(19) United States
(12) Patent Application Publication
(10) Pub. No.: US 2004/0014039 A1
(43) Pub. Date: Jan. 22, 2004

(54) Nucleic acids, proteins, and antibodies

(75) Inventors: Craig A. Rosen, Laytonsville, MD (US); Steven M. Ruben, Olney, MD (US); Steven C. Barash, Rockville, MD (US)

Correspondence Address: HUMAN GENOME SCIENCES INC, 9410 KEY WEST AVENUE, ROCKVILLE, MD, 20850

(73) Assignee: Human Genome Sciences, Inc., Rockville, MD (US)

(21) Appl. No.: 10/158,057

(22) Filed: May 31, 2002

Related U.S. Application Data
(63) Continuation of application No. 09/764,890, filed on Jan. 17, 2001.
(60) Provisional application No. 60/179,065, filed on Jan. 31, 2000.
(60) Provisional application No. 60/180,628, filed on Feb. 4, 2000.
(60) Provisional application No. 60/214,886, filed on Jun. 28, 2000.
(60) Provisional application No. 60/217,487, filed on Jul. 11, 2000.
(60) Provisional application No. 60/225,758, filed on Aug. 14, 2000.
(60) Provisional application No. 60/220,963, filed on Jul. 26, 2000.
(60) Provisional application No. 60/217,496, filed on Jul. 11, 2000.
(60) Provisional application No. 60/225,447, filed on Aug. 14, 2000.
(60) Provisional application No. 60/218,290, filed on Jul. 14, 2000.
(60) Provisional application No. 60/225,757, filed on Aug. 14, 2000.
(60) Provisional application No. 60/226,868, filed on Aug. 22, 2000.
(60) Provisional application No. 60/216,647, filed on Jul. 7, 2000.
(60) Provisional application No. 60/225,267, filed on Aug. 14, 2000.
(60) Provisional application No. 60/216,880, filed on Jul. 7, 2000.
(60) Provisional application No. 60/225,270, filed on Aug. 14, 2000.
(60) Provisional application No. 60/251,869, filed on Dec. 8, 2000.
(60) Provisional application No. 60/235,834, filed on Sep. 27, 2000.
(60) Provisional application No. 60/234,274, filed on Sep. 21, 2000.
(60) Provisional application No. 60/234,223, filed on Sep. 21, 2000.
(60) Provisional application No. 60/228,924, filed on Aug. 30, 2000.
(60) Provisional application No. 60/224,518, filed on Aug. 14, 2000.
(60) Provisional application No. 60/236,369, filed on Sep. 29, 2000.
(60) Provisional application No. 60/224,519, filed on Aug. 14, 2000.
(60) Provisional application No. 60/220,964, filed on Jul. 26, 2000.
(60) Provisional application No. 60/241,809, filed on Oct. 20, 2000.
(60) Provisional application No. 60/249,299, filed on Nov. 17, 2000.
(60) Provisional application No. 60/236,327, filed on Sep. 29, 2000.
(60) Provisional application No. 60/241,785, filed on Oct. 20, 2000.
(60) Provisional application No. 60/244,617, filed on Nov. 1, 2000.
(60) Provisional application No. 60/225,268, filed on Aug. 14, 2000.
(60) Provisional application No. 60/236,368, filed on Sep. 29, 2000.
(60) Provisional application No. 60/251,856, filed on Dec. 8, 2000.
(60) Provisional application No. 60/251,868, filed on Dec. 8, 2000.
(60) Provisional application No. 60/229,344, filed on Sep. 1, 2000.
(60) Provisional application No. 60/234,997, filed on Sep. 25, 2000.
(60) Provisional application No. 60/229,343, filed on Sep. 1, 2000.
(60) Provisional application No. 60/229,345, filed on Sep. 1, 2000.
(60) Provisional application No. 60/229,287, filed on Sep. 1, 2000.
(60) Provisional application No. 60/229,513, filed on Sep. 5, 2000.
(60) Provisional application No. 60/231,413, filed on Sep. 8, 2000.
(60) Provisional application No. 60/229,509, filed on Sep. 5, 2000.
(60) Provisional application No. 60/236,367, filed on Sep. 29, 2000.
(60) Provisional application No. 60/237,039, filed on Oct. 2, 2000.
(60) Provisional application No. 60/237,038, filed on Oct. 2, 2000.
(60) Provisional application No. 60/236,370, filed on Sep. 29, 2000.
(60) Provisional application No. 60/236,802, filed on Oct. 2, 2000.
(60) Provisional application No. 60/237,037, filed on Oct. 2, 2000.
(60) Provisional application No. 60/237,040, filed on Oct. 2, 2000.
(60) Provisional application No. 60/240,960, filed on Oct. 20, 2000.
(60) Provisional application No. 60/239,935, filed on Oct. 13, 2000.
(60) Provisional application No. 60/239,937, filed on Oct. 13, 2000.
(60) Provisional application No. 60/241,787, filed on Oct. 20, 2000.
(60) Provisional application No. 60/246,474, filed on Nov. 8, 2000.
(60) Provisional application No. 60/246,532, filed on Nov. 8, 2000.
(60) Provisional application No. 60/249,216, filed on Nov. 17, 2000.
(60) Provisional application No. 60/249,210, filed on Nov. 17, 2000.
(60) Provisional application No. 60/226,681, filed on Aug. 22, 2000.
(60) Provisional application No. 60/225,759, filed on Aug. 14, 2000.
(60) Provisional application No. 60/225,213, filed on Aug. 14, 2000.
(60) Provisional application No. 60/227,182, filed on Aug. 22, 2000.
(60) Provisional application No. 60/225,214, filed on Aug. 14, 2000.
(60) Provisional application No. 60/235,836, filed on Sep. 27, 2000.
(60) Provisional application No. 60/230,438, filed on Sep. 6, 2000.
(60) Provisional application No. 60/215,135, filed on Jun. 30, 2000.
(60) Provisional application No. 60/225,266, filed on Aug. 14, 2000.
(60) Provisional application No. 60/249,218, filed on Nov. 17, 2000.
(60) Provisional application No. 60/249,208, filed on Nov. 17, 2000.
(60) Provisional application No. 60/249,213, filed on Nov. 17, 2000.
(60) Provisional application No. 60/249,212, filed on Nov. 17, 2000.
(60) Provisional application No. 60/249,207, filed on Nov. 17, 2000.
(60) Provisional application No. 60/249,245, filed on Nov. 17, 2000.
(60) Provisional application No. 60/249,244, filed on Nov. 17, 2000.
(60) Provisional application No. 60/249,217, filed on Nov. 17, 2000.
(60) Provisional application No. 60/249,211, filed on Nov. 17, 2000.
(60) Provisional application No. 60/249,215, filed on Nov. 17, 2000.
(60) Provisional application No. 60/249,264, filed on Nov. 17, 2000.
(60) Provisional application No. 60/249,214, filed on Nov. 17, 2000.
(60) Provisional application No. 60/249,297, filed on Nov. 17, 2000.
(60) Provisional application No. 60/232,400, filed on Sep. 14, 2000.
(60) Provisional application No. 60/231,242, filed on Sep. 8, 2000.
(60) Provisional application No. 60/232,081, filed on Sep. 8, 2000.
(60) Provisional application No. 60/232,080, filed on Sep. 8, 2000.
(60) Provisional application No. 60/231,414, filed on Sep. 8, 2000.
(60) Provisional application No. 60/231,244, filed on Sep. 8, 2000.
(60) Provisional application No. 60/233,064, filed on Sep. 14, 2000.
(60) Provisional application No. 60/233,063, filed on Sep. 14, 2000.
(60) Provisional application No. 60/232,397, filed on Sep. 14, 2000.
(60) Provisional application No. 60/232,399, filed on Sep. 14, 2000.
(60) Provisional application No. 60/232,401, filed on Sep. 14, 2000.
(60) Provisional application No. 60/241,808, filed on Oct. 20, 2000.
(60) Provisional application No. 60/241,826, filed on Oct. 20, 2000.
(60) Provisional application No. 60/241,786, filed on Oct. 20, 2000.
(60) Provisional application No. 60/241,221, filed on Oct. 20, 2000.
(60) Provisional application No. 60/246,475, filed on Nov. 8, 2000.
(60) Provisional application No. 60/231,243, filed on Sep. 8, 2000.
(60) Provisional application No. 60/233,065, filed on Sep. 14, 2000.
(60) Provisional application No. 60/232,398, filed on Sep. 14, 2000.
(60) Provisional application No. 60/234,998, filed on Sep. 25, 2000.
(60) Provisional application No. 60/246,477, filed on Nov. 8, 2000.
(60) Provisional application No. 60/246,528, filed on Nov. 8, 2000.
(60) Provisional application No. 60/246,525, filed on Nov. 8, 2000.
(60) Provisional application No. 60/246,476, filed on Nov. 8, 2000.
(60) Provisional application No. 60/246,526, filed on Nov. 8, 2000.
(60) Provisional application No. 60/249,209, filed on Nov. 17, 2000.
(60) Provisional application No. 60/246,527, filed on Nov. 8, 2000.
(60) Provisional application No. 60/246,523, filed on Nov. 8, 2000.
(60) Provisional application No. 60/246,524, filed on Nov. 8, 2000.
(60) Provisional application No. 60/246,478, filed on Nov. 8, 2000.
(60) Provisional application No. 60/246,609, filed on Nov. 8, 2000.
(60) Provisional application No. 60/246,613, filed on Nov. 8, 2000.
(60) Provisional application No. 60/249,300, filed on Nov. 17, 2000.
(60) Provisional application No. 60/249,265, filed on Nov. 17, 2000.
(60) Provisional application No. 60/246,610, filed on Nov. 8, 2000.
(60) Provisional application No. 60/246,611, filed on Nov. 8, 2000.
(60) Provisional application No. 60/230,437, filed on Sep. 6, 2000.
(60) Provisional application No. 60/251,990, filed on Dec. 8, 2000.
(60) Provisional application No. 60/251,988, filed on Dec. 5, 2000.
(60) Provisional application No. 60/251,030, filed on Dec. 5, 2000.
(60) Provisional application No. 60/251,479, filed on Dec. 6, 2000.
(60) Provisional application No. 60/256,719, filed on Dec. 5, 2000.
(60) Provisional application No. 60/250,160, filed on Dec. 1, 2000.
(60) Provisional application No. 60/251,989, filed on Dec. 8, 2000.
(60) Provisional application No. 60/250,391, filed on Dec. 1, 2000.
(60) Provisional application No. 60/254,097, filed on Dec. 11, 2000.
(60) Provisional application No. 60/231,968, filed on Sep. 12, 2000.
(60) Provisional application No. 60/226,279, filed on Aug. 18, 2000.
(60) Provisional application No. 60/186,350, filed on Mar. 2, 2000.
(60) Provisional application No. 60/184,664, filed on Feb. 24, 2000.
(60) Provisional application No. 60/189,874, filed on Mar. 16, 2000.
(60) Provisional application No. 60/198,123, filed on Apr. 18, 2000.
(60) Provisional application No. 60/227,009, filed on Aug. 23, 2000.
(60) Provisional application No. 60/235,484, filed on Sep. 26, 2000.
(60) Provisional application No. 60/190,076, filed on Mar. 17, 2000.
(60) Provisional application No. 60/209,467, filed on Jun. 7, 2000.
(60) Provisional application No. 60/205,515, filed on May 19, 2000.
(60) Provisional application No. 60/259,678, filed on Jan. 5, 2001.

(51) Int. Cl. C12Q 1/68; G01N 33/53; C07H 21/04; C12N 9/00; C12P 21/02; C12N 5/06; C07K 14/47

(52) U.S. Cl. 435/6; 435/7.1; 435/69.1; 435/183; 435/320.1; 435/325; 530/350; 536/23.2; 514/12

(57) ABSTRACT

The present invention relates to novel proteins. More specifically, isolated nucleic acid molecules are provided encoding novel polypeptides. Novel polypeptides and antibodies that bind to these polypeptides are provided. Also provided are vectors, host cells, and recombinant and synthetic methods for producing human polynucleotides and/or polypeptides, and antibodies. The invention further relates to diagnostic and therapeutic methods useful for diagnosing, treating, preventing and/or prognosing disorders related to these novel polypeptides. The invention further relates to screening methods for identifying agonists and antagonists of polynucleotides and polypeptides of the invention. The present invention further relates to methods and/or compositions for inhibiting or enhancing the production and function of the polypeptides of the present invention.

### STATEMENT Under 37 C.F.R. §1.77(b)(4)

[0001] This application refers to a “Sequence Listing” listed below, which is provided as an electronic document on two identical compact discs (CD-R), labeled “Copy 1” and “Copy 2.” These compact discs each contain the file “PJZ05C1_seqList.txt” (830,802 bytes, created on May 24, 2002), which is hereby incorporated in its entirety herein.

[0002] The Sequence Listing may be viewed on an IBM-PC machine running the MS-Windows operating system.

### FIELD OF THE INVENTION

[0003] The present invention relates to novel proteins. More specifically, isolated nucleic acid molecules are provided encoding novel polypeptides. Novel polypeptides and antibodies that bind to these polypeptides are provided. Also provided are vectors, host cells, and recombinant and synthetic methods for producing human polynucleotides and/or polypeptides, and antibodies. The invention further relates to diagnostic and therapeutic methods useful for diagnosing, treating, preventing and/or prognosing disorders related to these novel polypeptides. The invention further relates to screening methods for identifying agonists and antagonists of polynucleotides and polypeptides of the invention. The present invention further relates to methods and/or compositions for inhibiting or enhancing the production and function of the polypeptides of the present invention.

### BACKGROUND OF THE INVENTION

[0004] The immune system is an intricate network of cells, tissues and soluble molecules that function to protect the body from invasion by foreign substances and pathogens. The major cells of the immune system are lymphocytes, including B cells and T cells, and myeloid cells, including basophils, eosinophils, neutrophils, mast cells, monocytes, macrophages and dendritic cells. In addition to these cellular components of the immune system, soluble molecules—such as antibodies, complement proteins, and cytokines—circulate in lymph and blood plasma, and play important roles in immunity.

[0005] The immune system can be subdivided into the acquired and innate immune systems. The cells of the innate immune system (e.g., neutrophils, eosinophils, basophils, mast cells) are not antigen specific and their action is not enhanced by repeated exposure to the same antigen. The cells of the acquired immune system (B and T cells) are antigen specific. Repeated exposure of B and T cells to an antigen results in improved immune repsonses (memory responses) produced by these cell types. The cells and products of the acquired immune system can recruit components of the innate system to mount a focused immune response. For a more extensive review of the immune system, see Fundamental Immunology, 4th edition, Ed. William Paul, Lippincott-Raven Pub. (1998).

[0006] An immune response is seldom carried out by a single cell type, but rather requires the coordinated efforts of several cell types. In order to coordinate an immune response, it is necessary that cells of the immune system communicate with each other and with other cells of the body. Communication between cells may be made by cell-cell contact, between membrane bound molecules on each cell, or by the interaction of soluble components of the immune system with cellular receptors. Signaling between cell types may have one or more of a variety of consequences, including activation, proliferation, differentiation, and apoptosis. Activation and differentiation of immune cells may result in the expression or secretion of polypeptides, or other molecules, which in turn affect the function of other cells and/or molecules of the immune system.

[0007] Molecules which stimulate or suppress immune system function are known as immunomodulators. These molecules, which include endogenous proteins (e.g., cytokines, cytokine receptors, and intracellular signal transduction molecules), molecules derived from microorganisms, and synthetic agents, may exert their modulatory effects at one or more stages of the immune response, such as antigen recognition, stimulation of cytokine production and release, and/or activation/differentiation of lymphocytes and myeloid cells. Immunomodulators may enhance (immunoprophylaxis, immunostimulation), restore (immunosubstitution, immunorestoration) or suppress (immunosuppression, immunodeviation) immunological functions or activities.

[0008] Immunomodulatory compounds have many important applications in clinical practice. For example, immunosuppressing agents (which attenuate or prevent unwanted immune responses) can be used to prevent tissue rejection during organ transplantation, to prevent Rh hemolytic disease of the newborn, or to treat autoimmune disorders. A mechanism of action common to many immunosuppressants is the inhibition of T cell activation and/or differentiation. Antilymphocyte antibodies have also been used to attenuate immune system functions. Currently-used immunosuppressive agents can produce a number of side effects which limit their use. Among the most serious secondary effects include kidney and liver toxicity, increased risk of infection, hyperglycemia, neoplasia, and osteoporosis (see, e.g., Freeman, Clin. Biochem. 24(1):9-14 (1991); Mitchison, Dig. Dis.11(2):78-101 (1993)).

[0009] Immunostimulants, which enhance the activity of immune cells and molecules, comprise another class of immunomodulatory agents with important clinical applications. Such applications include, for example, the treatment of immunodeficiency disorders (e.g. AIDS and severe combined immunodeficiency), chronic infectious diseases (e.g. viral hepatitis, papillomavirus, and herpesvirus), and cancer. An important class of endogenous immunostimulants is the cytokines. These soluble signaling molecules are produced by a number of cell types, and are critical to the regulation of the immune response. Immunostimulatory mechanisms can include proliferation, differentiation and/or activation of immune cells or progenitors of immune cells. For example, interleukin-2 (IL-2) binds to IL-2 receptors on T lymphocytes and induces proliferation and differentiation. Another cytokine, interferon alpha, stimulates the immune system through a variety of mechanisms, including activation of macrophages, T lymphocytes, and natural killer cells. Interferon alpha also induces the expression of antiviral proteins (see Chapter 50, The Pharmacological Basis of Therapeutics, 9^{th} Edition, Eds. Hardman, Limbird, Molinoff, Ruddon, and Gilman, McGraw Hill (1996)). Limitations of current immunostimulant therapies include anaphylaxis, pulmonary edema, and renal toxicity, to name a few.

[0010] The discovery of new human immunomodulatory polynucleotides, the polypeptides encoded by them, and antibodies that immunospecifically bind these polypeptides, satisfies a need in the art by providing new compositions which are useful in the diagnosis, treatment, prevention and/or prognosis of disorders of the immune system, including, but not limited to, autoimmune disorders (e.g., systemic lupus erythematosus, rheumatoid arthritis, idiopathic thrombocytopenic purpura and multiple sclerosis), immunodeficiencies (e.g., X-linked agammaglobulinemia, severe combined immunodeficiency, Wiskott-Aldrich syndrome, and ataxia telangiectasia), chronic infections (e.g., HIV, viral hepatitis, and herpesvirus), and neoplastic disorders. Additionally, immunomodulatory molecules would be useful as agents to boost immune responsiveness to pathogens or to suppress immune reactions, for example as is necessary in conjunction with organ transplantation.

### SUMMARY OF THE INVENTION

[0011] The present invention relates to novel proteins. More specifically, isolated nucleic acid molecules are provided encoding novel polypeptides. Novel polypeptides and antibodies that bind to these polypeptides are provided. Also provided are vectors, host cells, and recombinant and synthetic methods for producing human polynucleotides and/or polypeptides, and antibodies. The invention further relates to diagnostic and therapeutic methods useful for diagnosing, treating, preventing and/or prognosing disorders related to these novel polypeptides. The invention further relates to screening methods for identifying agonists and antagonists of polynucleotides and polypeptides of the invention. The present invention further relates to methods and/or compositions for inhibiting or enhancing the production and function of the polypeptides of the present invention.

### DETAILED DESCRIPTION

[0012] Tables

[0013] Table 1A summarizes some of the polynucleotides encompassed by the invention (including cDNA clones related to the sequences (Clone ID NO:Z), contig sequences (contig identifier (Contig ID:) and contig nucleotide sequence identifier (SEQ ID NO:X)) and further summarizes certain characteristics of these polynucleotides and the polypeptides encoded thereby. The first column provides the gene number in the application for each clone identifier. The second column provides a unique clone identifier, “Clone ID NO:Z”, for a cDNA clone related to each contig sequence disclosed in Table 1A. The third column provides a unique contig identifier, “Contig ID:” for each of the contig sequences disclosed in Table 1A. The fourth column provides the sequence identifier, “SEQ ID NO:X”, for each of the contig sequences disclosed in Table 1A. The fifth column, “ORF (From-To)”, provides the location (i.e., nucleotide position numbers) within the polynucleotide sequence of SEQ ID NO:X that delineate the preferred open reading frame (ORF) that encodes the amino acid sequence shown in the sequence listing and referenced in Table 1A as SEQ ID NO:Y (column 6). Column 7 lists residues comprising predicted epitopes contained in the polypeptides encoded by each of the preferred ORFs (SEQ ID NO:Y). Identification of potential immunogenic regions was performed according to the method of Jameson and Wolf (CABIOS, 4; 181-186 (1988)); specifically, the Genetics Computer Group (GCG) implementation of this algorithm, embodied in the program PEPTIDESTRUCTURE (Wisconsin Package v10.0, Genetics Computer Group (GCG), Madison, Wis.). This method returns a measure of the probability that a given residue is found on the surface of the protein. Regions where the antigenic index score is greater than 0.9 over at least 6 amino acids are indicated in Table 1A as “Predicted Epitopes”. In particular embodiments, polypeptides of the invention comprise, or alternatively consist of, one, two, three, four, five or more of the predicted epitopes described in Table 1A. It will be appreciated that depending on the analytical criteria used to predict antigenic determinants, the exact address of the determinant may vary slightly. Column 8, “Tissue Distribution” shows the expression profile of tissue, cells, and/or cell line libraries which express the polynucleotides of the invention. The first number in column 8 (preceding the colon), represents the tissue/cell source identifier code corresponding to the key provided in Table 4. Expression of these polynucleotides was not observed in the other tissues and/or cell libraries tested. For those identifier codes in which the first two letters are not “AR”, the second number in column 8 (following the colon), represents the number of times a sequence corresponding to the reference polynucleotide sequence (e.g., SEQ ID NO:X) was identified in the tissue/cell source. Those tissue/cell source identifier codes in which the first two letters are “AR” designate information generated using DNA array technology. Utilizing this technology, cDNAs were amplified by PCR and then transferred, in duplicate, onto the array. Gene expression was assayed through hybridization of first strand cDNA probes to the DNA array. cDNA probes were generated from total RNA extracted from a variety of different tissues and cell lines. Probe synthesis was performed in the presence of ³³P dCTP, using oligo(dT) to prime reverse transcription. After hybridization, high stringency washing conditions were employed to remove non-specific hybrids from the array. The remaining signal, emanating from each gene target, was measured using a Phosphorimager. Gene expression was reported as Phosphor Stimulating Luminescence (PSL) which reflects the level of phosphor signal generated from the probe hybridized to each of the gene targets represented on the array. A local background signal subtraction was performed before the total signal generated from each array was used to normalize gene expression between the different hybridizations. The value presented after “[array code]:” represents the mean of the duplicate values, following background subtraction and probe normalization. One of skill in the art could routinely use this information to identify normal and/or diseased tissue(s) which show a predominant expression pattern of the corresponding polynucleotide of the invention or to identify polynucleotides which show predominant and/or specific tissue and/or cell expression. Column 9 provides the chromosomal location of polynucleotides corresponding to SEQ ID NO:X. Chromosomal location was determined by finding exact matches to EST and cDNA sequences contained in the NCBI (National Center for Biotechnology Information) UniGene database. Given a presumptive chromosomal location, disease locus association was determined by comparison with the Morbid Map, derived from Online Mendelian Inheritance in Man (Online Mendelian Inheritance in Man, OMIM™. McKusick-Nathans Institute for Genetic Medicine, Johns Hopkins University (Baltimore, Md.) and National Center for Biotechnology Information, National Library of Medicine (Bethesda, Md.) 2000. World Wide Web URL: http://www.ncbi.nlm.nih.gov/omim/). If the putative chromosomal location of the Query overlaps with the chromosomal location of a Morbid Map entry, an OMIM identification number is disclosed in column 10 labeled “OMIM Disease Reference(s)”. A key to the OMIM reference identification numbers is provided in Table 5.

[0014] Table 1B summarizes additional polynucleotides encompassed by the invention (including cDNA clones related to the sequences (Clone ID NO:Z), contig sequences (contig identifier (Contig ID:) contig nucleotide sequence identifiers (SEQ ID NO:X)), and genomic sequences (SEQ ID NO:B). The first column provides a unique clone identifier, “Clone ID NO:Z”, for a cDNA clone related to each contig sequence. The second column provides the sequence identifier, “SEQ ID NO:X”, for each contig sequence. The third column provides a unique contig identifier, “Contig ID:” for each contig sequence. The fourth column, provides a BAC identifier “BAC ID NO:A” for the BAC clone referenced in the corresponding row of the table. The fifth column provides the nucleotide sequence identifier, “SEQ ID NO:B” for a fragment of the BAC clone identified in column four of the corresponding row of the table. The sixth column, “Exon From-To”, provides the location (i.e., nucleotide position numbers) within the polynucleotide sequence of SEQ ID NO:B which delineate certain polynucleotides of the invention that are also exemplary members of polynucleotide sequences that encode polypeptides of the invention (e.g., polypeptides containing amino acid sequences encoded by the polynucleotide sequences delineated in column six, and fragments and variants thereof).

[0015] Table 2 summarizes homology and features of some of the polypeptides of the invention. The first column provides a unique clone identifier, “Clone ID NO:Z”, corresponding to a cDNA clone disclosed in Table 1A. The second column provides the unique contig identifier, “Contig ID:” corresponding to contigs in Table 1A and allowing for correlation with the information in Table 1A. The third column provides the sequence identifier, “SEQ ID NO:X”, for the contig polynucleotide sequence. The fourth column provides the analysis method by which the homology/identity disclosed in the Table was determined. Comparisons were made between polypeptides encoded by the polynucleotides of the invention and either a non-redundant protein database (herein referred to as “NR”), or a database of protein families (herein referred to as “PFAM”) as further described below. The fifth column provides a description of the PFAM/NR hit having a significant match to a polypeptide of the invention. Column six provides the accession number of the PFAM/NR hit disclosed in the fifth column. Column seven, “Score/Percent Identity”, provides a quality score or the percent identity, of the hit disclosed in columns five and six. Columns 8 and 9, “NT From” and “NT To” respectively, delineate the polynucleotides in “SEQ ID NO:X” that encode a polypeptide having a significant match to the PFAM/NR database as disclosed in the fifth and sixth columns. In specific embodiments polypeptides of the invention comprise, or alternatively consist of, an amino acid sequence encoded by a polynucleotide in SEQ ID NO:X as delineated in columns 8 and 9, or fragments or variants thereof.

[0016] Table 3 provides polynucleotide sequences that may be disclaimed according to certain embodiments of the invention. The first column provides a unique clone identifier, “Clone ID”, for a cDNA clone related to contig sequences disclosed in Table 1A. The second column provides the sequence identifier, “SEQ ID NO:X”, for contig sequences disclosed in Table 1A. The third column provides the unique contig identifier, “Contig ID:”, for contigs disclosed in Table 1A. The fourth column provides a unique integer ‘a’ where ‘a’ is any integer between 1 and the final nucleotide minus 15 of SEQ ID NO:X, and the fifth column provides a unique integer ‘b’ where ‘b’ is any integer between 15 and the final nucleotide of SEQ ID NO:X, where both a and b correspond to the positions of nucleotide residues shown in SEQ ID NO:X, and where b is greater than or equal to a +14. For each of the polynucleotides shown as SEQ ID NO:X, the uniquely defined integers can be substituted into the general formula of a-b, and used to describe polynucleotides which may be preferably excluded from the invention. In certain embodiments, preferably excluded from the invention are at least one, two, three, four, five, ten, or more of the polynucleotide sequence(s) having the accession number(s) disclosed in the sixth column of this Table (including for example, published sequence in connection with a particular BAC clone). In further embodiments, preferably excluded from the invention are the specific polynucleotide sequence(s) contained in the clones corresponding to at least one, two, three, four, five, ten, or more of the available material having the accession numbers identified in the sixth column of this Table (including for example, the actual sequence contained in an identified BAC clone).

[0017] Table 4 provides a key to the tissue/cell source identifier code disclosed in Table 1A, column 8. Column 1 provides the tissue/cell source identifier code disclosed in Table 1A, Column 8. Columns 2-5 provide a description of the tissue or cell source. Codes corresponding to diseased tissues are indicated in column 6 with the word “disease”. The use of the word “disease” in column 6 is non-limiting. The tissue or cell source may be specific (e.g. a neoplasm), or may be disease-associated (e.g., a tissue sample from a normal portion of a diseased organ). Furthermore, tissues and/or cells lacking the “disease” designation may still be derived from sources directly or indirectly involved in a disease state or disorder, and therefore may have a further utility in that disease state or disorder. In numerous cases where the tissue/cell source is a library, column 7 identifies the vector used to generate the library.

[0018] Table 5 provides a key to the OMIM reference identification numbers disclosed in Table 1A, column 10. OMIM reference identification numbers (Column 1) were derived from Online Mendelian Inheritance in Man (Online Mendelian Inheritance in Man, OMIM. McKusick-Nathans Institute for Genetic Medicine, Johns Hopkins University (Baltimore, Md.) and National Center for Biotechnology Information, National Library of Medicine, (Bethesda, Md.) 2000. World Wide Web URL: http://www.ncbi.nlm.nih.gov/omim/). Column 2 provides diseases associated with the cytologic band disclosed in Table 1A, column 9, as determined using the Morbid Map database.

[0019] Table 6 summarizes ATCC Deposits, Deposit dates, and ATCC designation numbers of deposits made with the ATCC in connection with the present application.

[0020] Table 7 shows the cDNA libraries sequenced, and ATCC designation numbers and vector information relating to these cDNA libraries.

[0021] Table 8 provides a physical characterization of clones encompassed by the invention. The first column provides the unique clone identifier, “Clone ID NO:Z”, for certain cDNA clones of the invention, as described in Table 1A. The second column provides the size of the cDNA insert contained in the corresponding cDNA clone.

[0022] Definitions

[0023] The following definitions are provided to facilitate understanding of certain terms used throughout this specification.

[0024] In the present invention, “isolated” refers to material removed from its original environment (e.g., the natural environment if it is naturally occurring), and thus is altered “by the hand of man” from its natural state. For example, an isolated polynucleotide could be part of a vector or a composition of matter, or could be contained within a cell, and still be “isolated” because that vector, composition of matter, or particular cell is not the original environment of the polynucleotide. The term “isolated” does not refer to genomic or cDNA libraries, whole cell total or mRNA preparations, genomic DNA preparations (including those separated by electrophoresis and transferred onto blots), sheared whole cell genomic DNA preparations or other compositions where the art demonstrates no distinguishing features of the polynucleotide/sequences of the present invention.

[0025] As used herein, a “polynucleotide” refers to a molecule having a nucleic acid sequence encoding SEQ ID NO:Y or a fragment or variant thereof; a nucleic acid sequence contained in SEQ ID NO:X (as described in column 3 of Table 1A) or the complement thereof; a cDNA sequence contained in Clone ID NO:Z (as described in column 2 of Table 1A and contained within a library deposited with the ATCC); a nucleotide sequence encoding the polypeptide encoded by a nucleotide sequence in SEQ ID NO:B as defined in column 6 of Table 1B or a fragment or variant thereof; or a nucleotide coding sequence in SEQ ID NO:B as defined in column 6 of Table 1B or the complement thereof. For example, the polynucleotide can contain the nucleotide sequence of the full length cDNA sequence, including the 5′ and 3′ untranslated sequences, the coding region, as well as fragments, epitopes, domains, and variants of the nucleic acid sequence. Moreover, as used herein, a “polypeptide” refers to a molecule having an amino acid sequence encoded by a polynucleotide of the invention as broadly defined (obviously excluding poly-Phenylalanine or poly-Lysine peptide sequences which result from translation of a polyA tail of a sequence corresponding to a cDNA).

[0026] In the present invention, “SEQ ID NO:X” was often generated by overlapping sequences contained in multiple clones (contig analysis). A representative clone containing all or most of the sequence for SEQ ID NO:X is deposited at Human Genome Sciences, Inc. (HGS) in a catalogued and archived library. As shown, for example, in column 2 of Table 1A, each clone is identified by a cDNA Clone ID (identifier generally referred to herein as Clone ID NO:Z). Each Clone ID is unique to an individual clone and the Clone ID is all the information needed to retrieve a given clone from the HGS library. Furthermore, certain clones disclosed in this application have been deposited with the ATCC on Oct. 5, 2000, having the ATCC designation numbers PTA 2574 and PTA 2575; and on Jan. 5, 2001, having the depositor reference numbers TS-1, TS-2, AC-1, and AC-2. In addition to the individual cDNA clone deposits, most of the cDNA libraries from which the clones were derived were deposited at the American Type Culture Collection (hereinafter “ATCC”). Table 7 provides a list of the deposited cDNA libraries. One can use the Clone ID NO:Z to determine the library source by reference to Tables 6 and 7. Table 7 lists the deposited cDNA libraries by name and links each library to an ATCC Deposit. Library names contain four characters, for example, “HTWE.” The name of a cDNA clone (Clone ID) isolated from that library begins with the same four characters, for example “HTWEP07”. As mentioned below, Table 1A correlates the Clone ID names with SEQ ID NO:X. Thus, starting with an SEQ ID NO:X, one can use Tables 1, 6 and 7 to determine the corresponding Clone ID, which library it came from and which ATCC deposit the library is contained in. Furthermore, it is possible to retrieve a given cDNA clone from the source library by techniques known in the art and described elsewhere herein. The ATCC is located at 10801 University Boulevard, Manassas, Va. 20110-2209, USA. The ATCC deposits were made pursuant to the terms of the Budapest Treaty on the international recognition of the deposit of microorganisms for the purposes of patent procedure.

[0027] In specific embodiments, the polynucleotides of the invention are at least 15, at least 30, at least 50, at least 100, at least 125, at least 500, or at least 1000 continuous nucleotides but are less than or equal to 300 kb, 200 kb, 100 kb, 50 kb, 15 kb, 10 kb, 7.5 kb, 5 kb, 2.5 kb, 2.0 kb, or 1 kb, in length. In a further embodiment, polynucleotides of the invention comprise a portion of the coding sequences, as disclosed herein, but do not comprise all or a portion of any intron. In another embodiment, the polynucleotides comprising coding sequences do not contain coding sequences of a genomic flanking gene (i.e., 5′ or 3′ to the gene of interest in the genome). In other embodiments, the polynucleotides of the invention do not contain the coding sequence of more than 1000, 500, 250, 100, 50, 25, 20, 15, 10, 5, 4, 3, 2, or 1 genomic flanking gene(s).

[0028] A “polynucleotide” of the present invention also includes those polynucleotides capable of hybridizing, under stringent hybridization conditions, to sequences contained in SEQ ID NO:X, or the complement thereof (e.g., the complement of any one, two, three, four, or more of the polynucleotide fragments described herein), the polynucleotide sequence delineated in columns 8 and 9 of Table 2 or the complement thereof, and/or cDNA sequences contained in Clone ID NO:Z (e.g., the complement of any one, two, three, four, or more of the polynucleotide fragments, or the cDNA clone within the pool of cDNA clones deposited with the ATCC, described herein), and/or the polynucleotide sequence delineated in column 6 of Table 1B or the complement thereof. “Stringent hybridization conditions” refers to an overnight incubation at 42 degree C. in a solution comprising 50% formamide, 5×SSC (750 mM NaCl, 75 mM trisodium citrate), 50 mM sodium phosphate (pH 7.6), 5× Denhardt's solution, 10% dextran sulfate, and 20 μg/ml denatured, sheared salmon sperm DNA, followed by washing the filters in 0.1×SSC at about 65 degree C.

[0029] Also contemplated are nucleic acid molecules that hybridize to the polynucleotides of the present invention at lower stringency hybridization conditions. Changes in the stringency of hybridization and signal detection are primarily accomplished through the manipulation of formamide concentration (lower percentages of formamide result in lowered stringency); salt conditions, or temperature. For example, lower stringency conditions include an overnight incubation at 37 degree C. in a solution comprising 6×SSPE (20×SSPE 3M NaCl; 0.2M NaH₂PO₄; 0.02M EDTA, pH 7.4), 0.5% SDS, 30% formamide, 100 ug/ml salmon sperm blocking DNA; followed by washes at 50 degree C. with 1×SSPE, 0.1% SDS. In addition, to achieve even lower stringency, washes performed following stringent hybridization can be done at higher salt concentrations (e.g. 5×SSC).

[0030] Note that variations in the above conditions may be accomplished through the inclusion and/or substitution of alternate blocking reagents used to suppress background in hybridization experiments. Typical blocking reagents include Denhardt's reagent, BLOTTO, heparin, denatured salmon sperm DNA, and commercially available proprietary formulations. The inclusion of specific blocking reagents may require modification of the hybridization conditions described above, due to problems with compatibility.

[0031] Of course, a polynucleotide which hybridizes only to polyA+ sequences (such as any 3′ terminal polyA+ tract of a cDNA shown in the sequence listing), or to a complementary stretch of T (or U) residues, would not be included in the definition of “polynucleotide,” since such a polynucleotide would hybridize to any nucleic acid molecule containing a poly (A) stretch or the complement thereof (e.g., practically any double-stranded cDNA clone generated using oligo dT as a primer).

[0032] The polynucleotide of the present invention can be composed of any polyribonucleotide or polydeoxribonucleotide, which may be unmodified RNA or DNA or modified RNA or DNA. For example, polynucleotides can be composed of single- and double-stranded DNA, DNA that is a mixture of single- and double-stranded regions, single- and double-stranded RNA, and RNA that is mixture of single- and double-stranded regions, hybrid molecules comprising DNA and RNA that may be single-stranded or, more typically, double-stranded or a mixture of single- and double-stranded regions. In addition, the polynucleotide can be composed of triple-stranded regions comprising RNA or DNA or both RNA and DNA. A polynucleotide may also contain one or more modified bases or DNA or RNA backbones modified for stability or for other reasons. “Modified” bases include, for example, tritylated bases and unusual bases such as inosine. A variety of modifications can be made to DNA and RNA; thus, “polynucleotide” embraces chemically, enzymatically, or metabolically modified forms.

[0033] The polypeptide of the present invention can be composed of amino acids joined to each other by peptide bonds or modified peptide bonds, i.e., peptide isosteres, and may contain amino acids other than the 20 gene-encoded amino acids. The polypeptides may be modified by either natural processes, such as posttranslational processing, or by chemical modification techniques which are well known in the art. Such modifications are well described in basic texts and in more detailed monographs, as well as in a voluminous research literature. Modifications can occur anywhere in a polypeptide, including the peptide backbone, the amino acid side-chains and the amino or carboxyl termini. It will be appreciated that the same type of modification may be present in the same or varying degrees at several sites in a given polypeptide. Also, a given polypeptide may contain many types of modifications. Polypeptides may be branched, for example, as a result of ubiquitination, and they may be cyclic, with or without branching. Cyclic, branched, and branched cyclic polypeptides may result from posttranslation natural processes or may be made by synthetic methods. Modifications include acetylation, acylation, ADP-ribosylation, amidation, covalent attachment of flavin, covalent attachment of a heme moiety, covalent attachment of a nucleotide or nucleotide derivative, covalent attachment of a lipid or lipid derivative, covalent attachment of phosphotidylinositol, cross-linking, cyclization, disulfide bond formation, demethylation, formation of covalent cross-links, formation of cysteine, formation of pyroglutamate, formylation, gamma-carboxylation, glycosylation, GPI anchor formation, hydroxylation, iodination, methylation, myristoylation, oxidation, pegylation, proteolytic processing, phosphorylation, prenylation, racemization, selenoylation, sulfation, transfer-RNA mediated addition of amino acids to proteins such as arginylation, and ubiquitination. (See, for instance, PROTEINS—STRUCTURE AND MOLECULAR PROPERTIES, 2nd Ed., T. E. Creighton, W. H. Freeman and Company, New York (1993); POSTTRANSLATIONAL COVALENT MODIFICATION OF PROTEINS, B. C. Johnson, Ed., Academic Press, New York, pgs. 1-12 (1983); Seifter et al., Meth. Enzymol. 182:626-646 (1990); Rattan et al., Ann. N.Y. Acad. Sci. 663:48-62 (1992)).

[0034] “SEQ ID NO:X” refers to a polynucleotide sequence described, for example, in Tables 1A or 2, while “SEQ ID NO:Y” refers to a polypeptide sequence described in column 6 of Table 1A. SEQ ID NO:X is identified by an integer specified in column 4 of Table 1A. The polypeptide sequence SEQ ID NO:Y is a translated open reading frame (ORF) encoded by polynucleotide SEQ ID NO:X. “Clone ID NO:Z” refers to a cDNA clone described in column 2 of Table 1A.

[0035] “A polypeptide having functional activity” refers to a polypeptide capable of displaying one or more known functional activities associated with a full-length (complete) protein. Such functional activities include, but are not limited to, biological activity, antigenicity [ability to bind (or compete with a polypeptide for binding) to an anti-polypeptide antibody], immunogenicity (ability to generate antibody which binds to a specific polypeptide of the invention), ability to form multimers with polypeptides of the invention, and ability to bind to a receptor or ligand for a polypeptide.

[0036] The polypeptides of the invention can be assayed for functional activity (e.g. biological activity) using or routinely modifying assays known in the art, as well as assays described herein. Specifically, one of skill in the art may routinely assay immunomodulatory polypeptides (including fragments and variants) of the invention for activity using assays as described in Examples 21, 22, 23, 29, 32, 33, 35, 40, and 45.

[0037] “A polypeptide having biological activity” refers to a polypeptide exhibiting activity similar to, but not necessarily identical to, an activity of a polypeptide of the present invention, including mature forms, as measured in a particular biological assay, with or without dose dependency. In the case where dose dependency does exist, it need not be identical to that of the polypeptide, but rather substantially similar to the dose-dependence in a given activity as compared to the polypeptide of the present invention (i.e., the candidate polypeptide will exhibit greater activity or not more than about 25-fold less and, preferably, not more than about tenfold less activity, and most preferably, not more than about three-fold less activity relative to the polypeptide of the present invention).

[0038] Table 1A summarizes some of the polynucleotides encompassed by the invention (including contig sequences (SEQ ID NO:X) and clones (Clone ID NO:Z) and further summarizes certain characteristics of these polynucleotides and the polypeptides encoded thereby.

[0039] Polynucleotides and Polypeptides of the Invention

Polynucleotides and Polypeptides of the Invention TABLE 1A

| | | | | | | | Tissue | | |
|---|---|---|---|---|---|---|---|---|---|
| | | | | | | | Distribution | | |
| | | | | | | | Library | | |
| | | | | | AA | | code: count | | |
| | | | | | SEQ | | (see Table IV | | OMIM |
| | Clone ID | Contig | SEQ ID | ORF | ID | | for Library | Cytologic | Disease |
| Gene No: | NO: Z | ID: | NO: X | (From-To) | NO: Y | Predicted Epitopes | Codes) | Band | Reference(s): |
| 1 | HTTEK47 | 573649 | 11 | 2-349 | 175 | Leu-13 to Val-18, | AR061: 8, AR089: 6 | | |
| | | | | | | Thr-37 to Lys-46. | L0439: 5, H0622: 3, | | |
| | | | | | | | H0040: 2, L0794: 2, | | |
| | | | | | | | L0805: 2, L0758: 2, | | |
| | | | | | | | L0803: 1, L0375: 1, | | |
| | | | | | | | L0659: 1, L0789: 1, | | |
| | | | | | | | L0665: 1, H0579: 1, | | |
| | | | | | | | L0750: 1, L0779: 1, | | |
| | | | | | | | L0777: 1, L0752: 1 | | |
| | | | | | | | and L0755: 1. | | |
| 2 | HMSKF13 | 708207 | 12 | 2-400 | 176 | Arg-1 to Leu-7. | S0002: 1, H0134: 1 | | |
| | | | | | | | and L0596: 1. | | |
| 3 | HLHCT68 | 764745 | 13 | 44-217 | 177 | | AR061: 7, AR089: 6 | | |
| | | | | | | | L0748: 2 | | |
| | | | | | | | and H0024: 1. | | |
| 4 | HKAFF33 | 974200 | 14 | 2-187 | 178 | His-1 to Pro-7. | H0521: 174, | | |
| | | | | | | | H0556: 138, | | |
| | | | | | | | H0581: 90, S0278: | | |
| | | | | | | | 66, L0665: 66, H0542: | | |
| | | | | | | | 66, S0360: 64, H0543: | | |
| | | | | | | | 61, H0046: 57, S0344: | | |
| | | | | | | | 57, L0659: 55, S0358: | | |
| | | | | | | | 54, H0271: 50, S0142: | | |
| | | | | | | | 49, H0522: 49, S0144: | | |
| | | | | | | | 48, L0664: 46, H0265: | | |
| | | | | | | | 45, H0585: 45, H0657: | | |
| | | | | | | | 42, L0655: 41, H0445: | | |
| | | | | | | | 41, H0555: 37, L0666: | | |
| | | | | | | | 36, H0518: 35, H0486: | | |
| | | | | | | | 34, L0662: 34, S0132: | | |
| | | | | | | | 33, H0318: 33, H0622: | | |
| | | | | | | | 32, S0354: 31, H0090: | | |
| | | | | | | | 31, S0372: 31, H0575: | | |
| | | | | | | | 30, H0435: 29, H0641: | | |
| | | | | | | | 27, H0635: 26, S0126: | | |
| | | | | | | | 26, H0457: 25, H0634: | | |
| | | | | | | | 25, H0436: 25, H0423: | | |
| | | | | | | | 25, H0255: 24, H0250: | | |
| | | | | | | | 24, H0069: 22, H0591: | | |
| | | | | | | | 22, S0328: 22, H0509: | | |
| | | | | | | | 21, H0658: 21, L0601: | | |
| | | | | | | | 21, H0179: 20, S0002: | | |
| | | | | | | | 20, S0374: 20, H0648: | | |
| | | | | | | | 20, H0039: 19, L0378: | | |
| | | | | | | | 19, L0663: 19, H0422: | | |
| | | | | | | | 19, S0114: 18, S0116: | | |
| | | | | | | | 18, H0586: 18, S0428: | | |
| | | | | | | | 18, H0672: 18, H0583: | | |
| | | | | | | | 17, H0617: 17, L0748: | | |
| | | | | | | | 17, H0506: 17, L0596: | | |
| | | | | | | | 16, H0580: 15, H0031: | | |
| | | | | | | | 15, L0651: 15, H0619: | | |
| | | | | | | | 14, H0150: 14, L0657: | | |
| | | | | | | | 14, H0593: 14, L0754: | | |
| | | | | | | | 14, H0638: 13, H0063: | | |
| | | | | | | | 13, H0646: 13, L0599: | | |
| | | | | | | | 13, H0663: 12, S0376: | | |
| | | | | | | | 12, H0597: 12, H0644: | | |
| | | | | | | | 12, H0087: 12, L0648: | | |
| | | | | | | | 12, S0052: 12, H0576: | | |
| | | | | | | | 12, L0751: 12, S0026: | | |
| | | | | | | | 12, L0600: 12, T0002: | | |
| | | | | | | | 11, T0049: 11, S0212: | | |
| | | | | | | | 11, H0402: 11, S0356: | | |
| | | | | | | | 11, H0427: 11, H0040: | | |
| | | | | | | | 11, H0264: 11, H0561: | | |
| | | | | | | | 11, S0426: 11, L0653: | | |
| | | | | | | | 11, S0322: 11, S0134: | | |
| | | | | | | | 10, S0218: 10, H0650: | | |
| | | | | | | | 10, H0545: 10, H0510: | | |
| | | | | | | | 10, H0416: 10, S0022: | | |
| | | | | | | | 10, S0146: 10, S0027: | | |
| | | | | | | | 10, H0014: 9, | | |
| | | | | | | | H0188: 9, | | |
| | | | | | | | H0124: 9, L0646: 9, | | |
| | | | | | | | L0374: 9, H0660: 9, | | |
| | | | | | | | S0330: 9, S0044: 9, | | |
| | | | | | | | L0740: 9, H0656: 8, | | |
| | | | | | | | H0341: 8, H0587: 8, | | |
| | | | | | | | H0599: 8, H0036: 8, | | |
| | | | | | | | H0024: 8, S0003: 8, | | |
| | | | | | | | H0560: 8, H0647: 8, | | |
| | | | | | | | L0438: 8, H0670: 8, | | |
| | | | | | | | L0757: 8, S0040: 7, | | |
| | | | | | | | H0559: 7, H0004: 7, | | |
| | | | | | | | H0085: 7, L0483: 7, | | |
| | | | | | | | H0628: 7, L0762: 7, | | |
| | | | | | | | L0647: 7, S0380: 7, | | |
| | | | | | | | S3014: 7, S0011: 7, | | |
| | | | | | | | H0550: 6, H0574: 6, | | |
| | | | | | | | H0618: 6, H0421: 6, | | |
| | | | | | | | H0544: 6, H0050: 6, | | |
| | | | | | | | H0375: 6, T0006: 6, | | |
| | | | | | | | H0553: 6, H0488: 6, | | |
| | | | | | | | S0053: 6, H0682: 6, | | |
| | | | | | | | S0378: 6, H0187: 6, | | |
| | | | | | | | L0750: 6, L0581: 6, | | |
| | | | | | | | H0141: 5, L0785: 5, | | |
| | | | | | | | H0254: 5, H0661: 5, | | |
| | | | | | | | S0140: 5, S0222: 5, | | |
| | | | | | | | H0497: 5, H0632: 5, | | |
| | | | | | | | T0060: 5, H0251: 5, | | |
| | | | | | | | H0596: 5, H0213: 5, | | |
| | | | | | | | H0181: 5, H0598: 5, | | |
| | | | | | | | H0135: 5, H0551: 5, | | |
| | | | | | | | L0369: 5, L0372: 5, | | |
| | | | | | | | L0364: 5, L0375: 5, | | |
| | | | | | | | L0382: 5, S0216: 5, | | |
| | | | | | | | H0689: 5, L0602: 5, | | |
| | | | | | | | L0744: 5, L0439: 5, | | |
| | | | | | | | S0436: 5, H0653: 5, | | |
| | | | | | | | H0665: 5, H0394: 4, | | |
| | | | | | | | H0584: 4, S0046: 4, | | |
| | | | | | | | H0640: 4, H0431: 4, | | |
| | | | | | | | H0592: 4, H0204: 4, | | |
| | | | | | | | H0086: 4, S0051: 4, | | |
| | | | | | | | H0354: 4, H0038: 4, | | |
| | | | | | | | H0059: 4, H0652: 4, | | |
| | | | | | | | L0606: 4, L0783: 4, | | |
| | | | | | | | H0691: 4, H0690: 4, | | |
| | | | | | | | H0683: 4, L0747: 4, | | |
| | | | | | | | H0444: 4, L0603: 4, | | |
| | | | | | | | H0225: 3, H0161: 3, | | |
| | | | | | | | L0808: 3, S0282: 3, | | |
| | | | | | | | H0671: 3, H0459: 3, | | |
| | | | | | | | S0420: 3, H0489: 3, | | |
| | | | | | | | S0045: 3, H0370: 3, | | |
| | | | | | | | H0392: 3, H0590: 3, | | |
| | | | | | | | T0071: 3, H0546: 3, | | |
| | | | | | | | H0373: 3, H0630: 3, | | |
| | | | | | | | H0076: 3, H0284: 3, | | |
| | | | | | | | S0214: 3, H0688: 3, | | |
| | | | | | | | H0604: 3, H0424: 3, | | |
| | | | | | | | L0142: 3, H0032: 3, | | |
| | | | | | | | H0169: 3, H0674: 3, | | |
| | | | | | | | H0376: 3, H0316: 3, | | |
| | | | | | | | H0616: 3, H0477: 3, | | |
| | | | | | | | H0487: 3, H0494: 3, | | |
| | | | | | | | H0649: 3, H0529: 3, | | |
| | | | | | | | L0763: 3, L0769: 3, | | |
| | | | | | | | L0767: 3, L0775: 3, | | |
| | | | | | | | L0607: 3, L0656: 3, | | |
| | | | | | | | L0517: 3, L0542: 3, | | |
| | | | | | | | L0518: 3, L0782: 3, | | |
| | | | | | | | H0144: 3, H0684: 3, | | |
| | | | | | | | H0659: 3, H0666: 3, | | |
| | | | | | | | L0752: 3, S0434: 3, | | |
| | | | | | | | L0591: 3, L0592: 3, | | |
| | | | | | | | L0485: 3, L0362: 3, | | |
| | | | | | | | H0685: 2, H0664: 2, | | |
| | | | | | | | H0306: 2, H0125: 2, | | |
| | | | | | | | S0410: 2, S0300: 2, | | |
| | | | | | | | H0351: 2, H0549: 2, | | |
| | | | | | | | H0492: 2, L0586: 2, | | |
| | | | | | | | H0013: 2, H0191: 2, | | |
| | | | | | | | H0042: 2, H0274: 2, | | |
| | | | | | | | S0474: 2, H0309: 2, | | |
| | | | | | | | H0263: 2, H0235: 2, | | |
| | | | | | | | H0231: 2, H0123: 2, | | |
| | | | | | | | T0003: 2, H0015: 2, | | |
| | | | | | | | H0629: 2, H0060: 2, | | |
| | | | | | | | H0687: 2, H0286: 2, | | |
| | | | | | | | T0023: 2, H0030: 2, | | |
| | | | | | | | H0011: 2, H0182: 2, | | |
| | | | | | | | H0606: 2, H0388: 2, | | |
| | | | | | | | H0189: 2, S0036: 2, | | |
| | | | | | | | H0623: 2, H0102: 2, | | |
| | | | | | | | H0100: 2, L0475: 2, | | |
| | | | | | | | H0625: 2, S0294: 2, | | |
| | | | | | | | L0065: 2, S0438: 2, | | |
| | | | | | | | S0422: 2, L0637: 2, | | |
| | | | | | | | L0627: 2, L0642: 2, | | |
| | | | | | | | L0654: 2, L0527: 2, | | |
| | | | | | | | L0636: 2, L0540: 2, | | |
| | | | | | | | S0174: 2, H0134: 2, | | |
| | | | | | | | S0404: 2, S0406: 2, | | |
| | | | | | | | L0777: 2, L0755: 2, | | |
| | | | | | | | L0758: 2, L0759: 2, | | |
| | | | | | | | S0031: 2, S0308: 2, | | |
| | | | | | | | H0343: 2, L0588: 2, | | |
| | | | | | | | L0605: 2, L0595: 2, | | |
| | | | | | | | L0361: 2, H0668: 2, | | |
| | | | | | | | H0667: 2, S0456: 2, | | |
| | | | | | | | H0395: 1, H0224: 1, | | |
| | | | | | | | H0139: 1, H0159: 1, | | |
| | | | | | | | S0470: 1, S0342: 1, | | |
| | | | | | | | S0402: 1, H0662: 1, | | |
| | | | | | | | H0300: 1, S0442: 1, | | |
| | | | | | | | S0444: 1, H0675: 1, | | |
| | | | | | | | S0408: 1, H0208: 1, | | |
| | | | | | | | H0645: 1, H0393: 1, | | |
| | | | | | | | H0411: 1, H0437: 1, | | |
| | | | | | | | H0369: 1, H0608: 1, | | |
| | | | | | | | H0442: 1, H0409: 1, | | |
| | | | | | | | H0600: 1, H0333: 1, | | |
| | | | | | | | H0331: 1, H0257: 1, | | |
| | | | | | | | L0622: 1, L0623: 1, | | |
| | | | | | | | H0485: 1, N0009: 1, | | |
| | | | | | | | H0101: 1, S0280: 1, | | |
| | | | | | | | H0156: 1, L0021: 1, | | |
| | | | | | | | H0053: 1, H0349: 1, | | |
| | | | | | | | H0025: 1, H0253: 1, | | |
| | | | | | | | H0196: 1, H0194: 1, | | |
| | | | | | | | H0184: 1, L0040: 1, | | |
| | | | | | | | H0327: 1, H0439: 1, | | |
| | | | | | | | H0045: 1, H0041: 1, | | |
| | | | | | | | N0006: 1, H0081: 1, | | |
| | | | | | | | H0620: 1, L0163: 1, | | |
| | | | | | | | T0010: 1, H0083: 1, | | |
| | | | | | | | H0109: 1, H0247: 1, | | |
| | | | | | | | H0266: 1, S0316: 1, | | |
| | | | | | | | H0290: 1, H0292: 1, | | |
| | | | | | | | S0314: 1, S0250: 1, | | |
| | | | | | | | H0252: 1, H0615: 1, | | |
| | | | | | | | H0428: 1, L0194: 1, | | |
| | | | | | | | H0180: 1, L0055: 1, | | |
| | | | | | | | H0165: 1, S0364: 1, | | |
| | | | | | | | H0361: 1, S0366: 1, | | |
| | | | | | | | H0163: 1, H0372: 1, | | |
| | | | | | | | H0433: 1, T0069: 1, | | |
| | | | | | | | L0370: 1, T0041: 1, | | |
| | | | | | | | S0370: 1, S0382: 1, | | |
| | | | | | | | S0306: 1, S0466: 1, | | |
| | | | | | | | S0440: 1, H0538: 1, | | |
| | | | | | | | L0598: 1, L0520: 1, | | |
| | | | | | | | L0640: 1, L0371: 1, | | |
| | | | | | | | L0535: 1, L0631: 1, | | |
| | | | | | | | L0638: 1, L0761: 1, | | |
| | | | | | | | L0630: 1, L0772: 1, | | |
| | | | | | | | L0373: 1, L0641: 1, | | |
| | | | | | | | L0765: 1, L0771: 1, | | |
| | | | | | | | L0521: 1, L0768: 1, | | |
| | | | | | | | L0766: 1, L0386: 1, | | |
| | | | | | | | L0774: 1, L0806: 1, | | |
| | | | | | | | L0652: 1, L0776: 1, | | |
| | | | | | | | L0661: 1, L0628: 1, | | |
| | | | | | | | L0658: 1, L0547: 1, | | |
| | | | | | | | L0546: 1, L0383: 1, | | |
| | | | | | | | L0519: 1, L0545: 1, | | |
| | | | | | | | L0528: 1, T0068: 1, | | |
| | | | | | | | S0148: 1, H0519: 1, | | |
| | | | | | | | S0122: 1, H0579: 1, | | |
| | | | | | | | S0332: 1, S0350: 1, | | |
| | | | | | | | S0190: 1, S0188: 1, | | |
| | | | | | | | H0214: 1, H0626: 1, | | |
| | | | | | | | H0631: 1, L0611: 1, | | |
| | | | | | | | S0118: 1, S3012: 1, | | |
| | | | | | | | S0028: 1, S0206: 1, | | |
| | | | | | | | L0742: 1, L0743: 1, | | |
| | | | | | | | L0749: 1, L0756: 1, | | |
| | | | | | | | L0753: 1, L0731: 1, | | |
| | | | | | | | S0260: 1, H0595: 1, | | |
| | | | | | | | L0604: 1, L0366: 1, | | |
| | | | | | | | S0106: 1, S0192: 1, | | |
| | | | | | | | S0194: 1, S0452: 1, | | |
| | | | | | | | S0462: 1 | | |
| | | | | | | | and S0384: 1. | | |
| 5 | HTLAQ18 | 1193114 | 15 | 267-758 | 179 | Thr-40 to Gly-66, | AR061: 11, AR089: 6 | | |
| | | | | | | Gly-78 to Pro-84, | L0779: 3, L0758: 3, | | |
| | | | | | | Gln-93 to Ser-107, | H0618: 2, H0253: 1, | | |
| | | | | | | Ala-138 to Gln-145. | H0009: 1 | | |
| | | | | | | | and H0012: 1. | | |
| | | 811792 | 118 | 2-493 | 282 | Ala-1 to Glu-11. | | | |
| 6 | HLYAW15 | 976531 | 16 | 3-395 | 180 | Arg-42 to Glu-47, | H0039: 1, H0521: 1 | | |
| | | | | | | Asp-65 to Arg-76, | and H0445: 1. | | |
| | | | | | | Gln-82 to Trp-88, | | | |
| | | | | | | Pro-90 to Thr-99. | | | |
| | | 974192 | 119 | 3-533 | 283 | Arg-42 to Glu-47, | | | |
| | | | | | | Asp-65 to Arg-76, | | | |
| | | | | | | Gln-82 to Arg-111. | | | |
| 7 | HMCFY36 | 943638 | 17 | 1-291 | 181 | Gln-1 to Glu-12, | S0344: 1 | 6p21.3 | 106300, |
| | | | | | | Tyr-20 to Glu-25. | and L0601: 1. | | 108800, |
| | | | | | | | | | 120290, |
| | | | | | | | | | 120290, |
| | | | | | | | | | 120810, |
| | | | | | | | | | 120820, |
| | | | | | | | | | 142857, |
| | | | | | | | | | 142858, |
| | | | | | | | | | 150270, |
| | | | | | | | | | 167250, |
| | | | | | | | | | 170261, |
| | | | | | | | | | 177900, |
| | | | | | | | | | 179450, |
| | | | | | | | | | 201910, |
| | | | | | | | | | 217000, |
| | | | | | | | | | 222100, |
| | | | | | | | | | 233100, |
| | | | | | | | | | 235200, |
| | | | | | | | | | 248611, |
| | | | | | | | | | 256550, |
| | | | | | | | | | 256550, |
| | | | | | | | | | 600202, |
| | | | | | | | | | 600261, |
| | | | | | | | | | 601868, |
| | | | | | | | | | 602280, |
| | | | | | | | | | 602475 |
| 8 | HMSPF61 | 1226544 | 18 | 283-657 | 182 | | AR089: 43, AR061: 8 | | |
| | | 861249 | 120 | 283-657 | 284 | | | | |
| 9 | HMWDR50 | 667595 | 19 | 98-535 | 183 | Pro-3 to Trp-12, | H0056: 2, H0265: 1, | 6p21.3 | 106300, |
| | | | | | | Ser-24 to Pro-29, | H0341: 1, S0278: 1, | | 108800, |
| | | | | | | Glu-34 to Gly-40. | H0179: 1, H0271: 1, | | 120290, |
| | | | | | | | H0284: 1 | | 120290, |
| | | | | | | | and H0521: 1. | | 120810, |
| | | | | | | | | | 120820, |
| | | | | | | | | | 142857, |
| | | | | | | | | | 142858, |
| | | | | | | | | | 150270, |
| | | | | | | | | | 167250, |
| | | | | | | | | | 170261, |
| | | | | | | | | | 177900, |
| | | | | | | | | | 179450, |
| | | | | | | | | | 201910, |
| | | | | | | | | | 217000, |
| | | | | | | | | | 222100, |
| | | | | | | | | | 233100, |
| | | | | | | | | | 235200, |
| | | | | | | | | | 248611, |
| | | | | | | | | | 256550, |
| | | | | | | | | | 256550, |
| | | | | | | | | | 600202, |
| | | | | | | | | | 600261, |
| | | | | | | | | | 601868, |
| | | | | | | | | | 602280, |
| | | | | | | | | | 602475 |
| 10 | HSSJM44 | 1175100 | 20 | 62-1867 | 184 | Arg-94 to Arg-99, | AR089: 1, AR061: 1 | | |
| | | | | | | Val-144 to Tyr-151, | L0439: 5, H0620: 3, | | |
| | | | | | | Arg-180 to Asn-185, | L0769: 3, H0556: 2, | | |
| | | | | | | Leu-231 to Pro-236, | H0012: 2, H0024: 2, | | |
| | | | | | | Pro-393 to Tyr-399, | S0051: 2, H0100: 2, | | |
| | | | | | | Asn-422 to Gly-435, | L0770: 2, L0774: 2, | | |
| | | | | | | Leu-457 to Trp-464, | L0438: 2, L0751: 2, | | |
| | | | | | | Tyr-469 to Val-474, | L0779: 2, S0444: 1, | | |
| | | | | | | Lys-488 to Lys-497, | H0550: 1, H0013: 1, | | |
| | | | | | | Gln-549 to Thr-555. | H0575: 1, S0010: 1, | | |
| | | | | | | | H0421: 1, H0052: 1, | | |
| | | | | | | | T0110: 1, H0545: 1, | | |
| | | | | | | | H0009: 1, H0050: 1, | | |
| | | | | | | | H0083: 1, H0604: 1, | | |
| | | | | | | | S0036: 1, H0135: 1, | | |
| | | | | | | | H0038: 1, H0551: 1, | | |
| | | | | | | | H0264: 1, H0059: 1, | | |
| | | | | | | | L0564: 1, L0637: 1, | | |
| | | | | | | | L0772: 1, L0771: 1, | | |
| | | | | | | | L0499: 1, L0806: 1, | | |
| | | | | | | | H0547: 1, S0152: 1, | | |
| | | | | | | | H0555: 1, L0747: 1, | | |
| | | | | | | | L0777: 1, L0755: 1, | | |
| | | | | | | | L0758: 1, L0592: 1, | | |
| | | | | | | | H0423: 1 | | |
| | | | | | | | and H0352: 1. | | |
| | | 871067 | 121 | 406-960 | 285 | Cys-1 to His-7. | | | |
| 11 | HPTXN38 | 974195 | 21 | 3-362 | 185 | His-1 to Arg-16. | H0521: 174, | 6p21.3 | 106300, |
| | | | | | | | H0556: 138, | | 108800, |
| | | | | | | | H0581: 90, S0278: | | 120290, |
| | | | | | | | 66, L0665: 66, H0542: | | 120290, |
| | | | | | | | 66, S0360: 64, H0543: | | 120810, |
| | | | | | | | 61, H0046: 57, S0344: | | 120820, |
| | | | | | | | 57, L0659: 55, S0358: | | 142857, |
| | | | | | | | 54, H0271: 50, S0142: | | 142858, |
| | | | | | | | 49, H0522: 49, S0144: | | 150270, |
| | | | | | | | 48, L0664: 46, H0265: | | 167250, |
| | | | | | | | 45, H0585: 45, H0657: | | 170261, |
| | | | | | | | 42, L0655: 41, H0445: | | 177900, |
| | | | | | | | 41, H0555: 37, L0666: | | 179450, |
| | | | | | | | 36, H0518: 35, H0486: | | 201910, |
| | | | | | | | 34, L0662: 34, S0132: | | 217000, |
| | | | | | | | 33, H0318: 33, H0622: | | 222100, |
| | | | | | | | 32, S0354: 31, H0090: | | 233100, |
| | | | | | | | 31, S0372: 31, H0575: | | 235200, |
| | | | | | | | 30, H0435: 29, H0641: | | 248611, |
| | | | | | | | 27, H0635: 26, S0126: | | 256550, |
| | | | | | | | 26, H0457: 25, H0634: | | 256550, |
| | | | | | | | 25, H0436: 25, H0423: | | 600202, |
| | | | | | | | 25, H0255: 24, H0250: | | 600261, |
| | | | | | | | 24, H0069: 22, H0591: | | 601868, |
| | | | | | | | 22, S0328: 22, H0509: | | 602280, |
| | | | | | | | 21, H0658: 21, L0601: | | 602475 |
| | | | | | | | 21, H0179: 20, S0002: | | |
| | | | | | | | 20, S0374: 20, H0648: | | |
| | | | | | | | 20, H0039: 19, L0378: | | |
| | | | | | | | 19, L0663: 19, H0422: | | |
| | | | | | | | 19, S0114: 18, S0116: | | |
| | | | | | | | 18, H0586: 18, S0428: | | |
| | | | | | | | 18, H0672: 18, H0583: | | |
| | | | | | | | 17, H0617: 17, L0748: | | |
| | | | | | | | 17, H0506: 17, L0596: | | |
| | | | | | | | 16, H0580: 15, H0031: | | |
| | | | | | | | 15, L0651: 15, H0619: | | |
| | | | | | | | 14, H0150: 14, L0657: | | |
| | | | | | | | 14, H0593: 14, L0754: | | |
| | | | | | | | 14, H0638: 13, H0063: | | |
| | | | | | | | 13, H0646: 13, L0599: | | |
| | | | | | | | 13, H0663: 12, S0376: | | |
| | | | | | | | 12, H0597: 12, H0644: | | |
| | | | | | | | 12, H0087: 12, L0648: | | |
| | | | | | | | 12, S0052: 12, H0576: | | |
| | | | | | | | 12, L0751: 12, S0026: | | |
| | | | | | | | 12, L0600: 12, T0002: | | |
| | | | | | | | 11, T0049: 11, S0212: | | |
| | | | | | | | 11, H0402: 11, S0356: | | |
| | | | | | | | 11, H0427: 11, H0040: | | |
| | | | | | | | 11, H0264: 11, H0561: | | |
| | | | | | | | 11, S0426: 11, L0653: | | |
| | | | | | | | 11, S0322: 11, S0134: | | |
| | | | | | | | 10, S0218: 10, H0650: | | |
| | | | | | | | 10, H0545: 10, H0510: | | |
| | | | | | | | 10, H0416: 10, S0022: | | |
| | | | | | | | 10, S0146: 10, S0027: | | |
| | | | | | | | 10, H0014: 9, | | |
| | | | | | | | H0188: 9, | | |
| | | | | | | | H0124: 9, L0646: 9, | | |
| | | | | | | | L0374: 9, H0660: 9, | | |
| | | | | | | | S0330: 9, S0044: 9, | | |
| | | | | | | | L0740: 9, H0656: 8, | | |
| | | | | | | | H0341: 8, H0587: 8, | | |
| | | | | | | | H0599: 8, H0036: 8, | | |
| | | | | | | | H0024: 8, S0003: 8, | | |
| | | | | | | | H0560: 8, H0647: 8, | | |
| | | | | | | | L0438: 8, H0670: 8, | | |
| | | | | | | | L0757: 8, S0040: 7, | | |
| | | | | | | | H0559: 7, H0004: 7, | | |
| | | | | | | | H0085: 7, L0483: 7, | | |
| | | | | | | | H0628: 7, L0762: 7, | | |
| | | | | | | | L0647: 7, S0380: 7, | | |
| | | | | | | | S3014: 7, S0011: 7, | | |
| | | | | | | | H0550: 6, H0574: 6, | | |
| | | | | | | | H0618: 6, H0421: 6, | | |
| | | | | | | | H0544: 6, H0050: 6, | | |
| | | | | | | | H0375: 6, T0006: 6, | | |
| | | | | | | | H0553: 6, H0488: 6, | | |
| | | | | | | | S0053: 6, H0682: 6, | | |
| | | | | | | | S0378: 6, H0187: 6, | | |
| | | | | | | | L0750: 6, L0581: 6, | | |
| | | | | | | | H0141: 5, L0785: 5, | | |
| | | | | | | | H0254: 5, H0661: 5, | | |
| | | | | | | | S0140: 5, S0222: 5, | | |
| | | | | | | | H0497: 5, H0632: 5, | | |
| | | | | | | | T0060: 5, H0251: 5, | | |
| | | | | | | | H0596: 5, H0213: 5, | | |
| | | | | | | | H0181: 5, H0598: 5, | | |
| | | | | | | | H0135: 5, H0551: 5, | | |
| | | | | | | | L0369: 5, L0372: 5, | | |
| | | | | | | | L0364: 5, L0375: 5, | | |
| | | | | | | | L0382: 5, S0216: 5, | | |
| | | | | | | | H0689: 5, L0602: 5, | | |
| | | | | | | | L0744: 5, L0439: 5, | | |
| | | | | | | | S0436: 5, H0653: 5, | | |
| | | | | | | | H0665: 5, H0394: 4, | | |
| | | | | | | | H0584: 4, S0046: 4, | | |
| | | | | | | | H0640: 4, H0431: 4, | | |
| | | | | | | | H0592: 4, H0204: 4, | | |
| | | | | | | | H0086: 4, S0051: 4, | | |
| | | | | | | | H0354: 4, H0038: 4, | | |
| | | | | | | | H0059: 4, H0652: 4, | | |
| | | | | | | | L0606: 4, L0783: 4, | | |
| | | | | | | | H0691: 4, H0690: 4, | | |
| | | | | | | | H0683: 4, L0747: 4, | | |
| | | | | | | | H0444: 4, L0603: 4, | | |
| | | | | | | | H0225: 3, H0161: 3, | | |
| | | | | | | | L0808: 3, S0282: 3, | | |
| | | | | | | | H0671: 3, H0459: 3, | | |
| | | | | | | | S0420: 3, H0489: 3, | | |
| | | | | | | | S0045: 3, H0370: 3, | | |
| | | | | | | | H0392: 3, H0590: 3, | | |
| | | | | | | | T0071: 3, H0546: 3, | | |
| | | | | | | | H0373: 3, H0630: 3, | | |
| | | | | | | | H0076: 3, H0284: 3, | | |
| | | | | | | | S0214: 3, H0688: 3, | | |
| | | | | | | | H0604: 3, H0424: 3, | | |
| | | | | | | | L0142: 3, H0032: 3, | | |
| | | | | | | | H0169: 3, H0674: 3, | | |
| | | | | | | | H0376: 3, H0316: 3, | | |
| | | | | | | | H0616: 3, H0477: 3, | | |
| | | | | | | | H0487: 3, H0494: 3, | | |
| | | | | | | | H0649: 3, H0529: 3, | | |
| | | | | | | | L0763: 3, L0769: 3, | | |
| | | | | | | | L0767: 3, L0775: 3, | | |
| | | | | | | | L0607: 3, L0656: 3, | | |
| | | | | | | | L0517: 3, L0542: 3, | | |
| | | | | | | | L0518: 3, L0782: 3, | | |
| | | | | | | | H0144: 3, H0684: 3, | | |
| | | | | | | | H0659: 3, H0666: 3, | | |
| | | | | | | | L0752: 3, S0434: 3, | | |
| | | | | | | | L0591: 3, L0592: 3, | | |
| | | | | | | | L0485: 3, L0362: 3, | | |
| | | | | | | | H0685: 2, H0664: 2, | | |
| | | | | | | | H0306: 2, H0125: 2, | | |
| | | | | | | | S0410: 2, S0300: 2, | | |
| | | | | | | | H0351: 2, H0549: 2, | | |
| | | | | | | | H0492: 2, L0586: 2, | | |
| | | | | | | | H0013: 2, H0191: 2, | | |
| | | | | | | | H0042: 2, H0274: 2, | | |
| | | | | | | | S0474: 2, H0309: 2, | | |
| | | | | | | | H0263: 2, H0235: 2, | | |
| | | | | | | | H0231: 2, H0123: 2, | | |
| | | | | | | | T0003: 2, H0015: 2, | | |
| | | | | | | | H0629: 2, H0060: 2, | | |
| | | | | | | | H0687: 2, H0286: 2, | | |
| | | | | | | | T0023: 2, H0030: 2, | | |
| | | | | | | | H0111: 2, H0182: 2, | | |
| | | | | | | | H0606: 2, H0388: 2, | | |
| | | | | | | | H0189: 2, S0036: 2, | | |
| | | | | | | | H0623: 2, H0102: 2, | | |
| | | | | | | | H0100: 2, L0475: 2, | | |
| | | | | | | | H0625: 2, S0294: 2, | | |
| | | | | | | | L0065: 2, S0438: 2, | | |
| | | | | | | | S0422: 2, L0637: 2, | | |
| | | | | | | | L0627: 2, L0642: 2, | | |
| | | | | | | | L0654: 2, L0527: 2, | | |
| | | | | | | | L0636: 2, L0540: 2, | | |
| | | | | | | | S0174: 2, H0134: 2, | | |
| | | | | | | | S0404: 2, S0406: 2, | | |
| | | | | | | | L0777: 2, L0755: 2, | | |
| | | | | | | | L0758: 2, L0759: 2, | | |
| | | | | | | | S0031: 2, S0308: 2, | | |
| | | | | | | | H0343: 2, L0588: 2, | | |
| | | | | | | | L0605: 2, L0595: 2, | | |
| | | | | | | | L0361: 2, H0668: 2, | | |
| | | | | | | | H0667: 2, S0456: 2, | | |
| | | | | | | | H0395: 1, H0224: 1, | | |
| | | | | | | | H0139: 1, H0159: 1, | | |
| | | | | | | | S0470: 1, S0342: 1, | | |
| | | | | | | | S0402: 1, H0662: 1, | | |
| | | | | | | | H0300: 1, S0442: 1, | | |
| | | | | | | | S0444: 1, H0675: 1, | | |
| | | | | | | | S0408: 1, H0208: 1, | | |
| | | | | | | | H0645: 1, H0393: 1, | | |
| | | | | | | | H0411: 1, H0437: 1, | | |
| | | | | | | | H0369: 1, H0608: 1, | | |
| | | | | | | | H0442: 1, H0409: 1, | | |
| | | | | | | | H0600: 1, H0333: 1, | | |
| | | | | | | | H0331: 1, H0257: 1, | | |
| | | | | | | | L0622: 1, L0623: 1, | | |
| | | | | | | | H0485: 1, N0009: 1, | | |
| | | | | | | | H0101: 1, S0280: 1, | | |
| | | | | | | | H0156: 1, L0021: 1, | | |
| | | | | | | | H0053: 1, H0349: 1, | | |
| | | | | | | | H0025: 1, H0253: 1, | | |
| | | | | | | | H0196: 1, H0194: 1, | | |
| | | | | | | | H0184: 1, L0040: 1, | | |
| | | | | | | | H0327: 1, H0439: 1, | | |
| | | | | | | | H0045: 1, H0041: 1, | | |
| | | | | | | | N0006: 1, H0081: 1, | | |
| | | | | | | | H0620: 1, L0163: 1, | | |
| | | | | | | | T0010: 1, H0083: 1, | | |
| | | | | | | | H0109: 1, H0247: 1, | | |
| | | | | | | | H0266: 1, S0316: 1, | | |
| | | | | | | | H0290: 1, H0292: 1, | | |
| | | | | | | | S0314: 1, S0250: 1, | | |
| | | | | | | | H0252: 1, H0615: 1, | | |
| | | | | | | | H0428: 1, L0194: 1, | | |
| | | | | | | | H0180: 1, L0055: 1, | | |
| | | | | | | | H0165: 1, S0364: 1, | | |
| | | | | | | | H0361: 1, S0366: 1, | | |
| | | | | | | | H0163: 1, H0372: 1, | | |
| | | | | | | | H0433: 1, T0069: 1, | | |
| | | | | | | | L0370: 1, T0041: 1, | | |
| | | | | | | | S0370: 1, S0382: 1, | | |
| | | | | | | | S0306: 1, S0466: 1, | | |
| | | | | | | | S0440: 1, H0538: 1, | | |
| | | | | | | | L0598: 1, L0520: 1, | | |
| | | | | | | | L0640: 1, L0371: 1, | | |
| | | | | | | | L0535: 1, L0631: 1, | | |
| | | | | | | | L0638: 1, L0761: 1, | | |
| | | | | | | | L0630: 1, L0772: 1, | | |
| | | | | | | | L0373: 1, L0641: 1, | | |
| | | | | | | | L0765: 1, L0771: 1, | | |
| | | | | | | | L0521: 1, L0768: 1, | | |
| | | | | | | | L0766: 1, L0386: 1, | | |
| | | | | | | | L0774: 1, L0806: 1, | | |
| | | | | | | | L0652: 1, L0776: 1, | | |
| | | | | | | | L0661: 1, L0628: 1, | | |
| | | | | | | | L0658: 1, L0547: 1, | | |
| | | | | | | | L0546: 1, L0383: 1, | | |
| | | | | | | | L0519: 1, L0545: 1, | | |
| | | | | | | | L0528: 1, T0068: 1, | | |
| | | | | | | | S0148: 1, H0519: 1, | | |
| | | | | | | | S0122: 1, H0579: 1, | | |
| | | | | | | | S0332: 1, S0350: 1, | | |
| | | | | | | | S0190: 1, S0188: 1, | | |
| | | | | | | | H0214: 1, H0626: 1, | | |
| | | | | | | | H0631: 1, L0611: 1, | | |
| | | | | | | | S0118: 1, S3012: 1, | | |
| | | | | | | | S0028: 1, S0206: 1, | | |
| | | | | | | | L0742: 1, L0743: 1, | | |
| | | | | | | | L0749: 1, L0756: 1, | | |
| | | | | | | | L0753: 1, L0731: 1, | | |
| | | | | | | | S0260: 1, H0595: 1, | | |
| | | | | | | | L0604: 1, L0366: 1, | | |
| | | | | | | | S0106: 1, S0192: 1, | | |
| | | | | | | | S0194: 1, S0452: 1, | | |
| | | | | | | | S0462: 1 | | |
| | | | | | | | and S0384: 1. | | |
| 12 | HRKPA05 | 974201 | 22 | 3-149 | 186 | Arg-15 to Arg-28. | AR089: 0, AR061: 0 | | |
| | | | | | | | H0521: 174, | | |
| | | | | | | | H0556: 138, | | |
| | | | | | | | H0581: 90, S0278: | | |
| | | | | | | | 66, L0665: 66, H0542: | | |
| | | | | | | | 66, S0360: 64, H0543: | | |
| | | | | | | | 61, H0046: 57, S0344: | | |
| | | | | | | | 57, L0659: 55, S0358: | | |
| | | | | | | | 54, H0271: 50, S0142: | | |
| | | | | | | | 49, H0522: 49, S0144: | | |
| | | | | | | | 48, L0664: 46, H0265: | | |
| | | | | | | | 45, H0585: 45, H0657: | | |
| | | | | | | | 42, L0655: 41, H0445: | | |
| | | | | | | | 41, H0555: 37, L0666: | | |
| | | | | | | | 36, H0518: 35, H0486: | | |
| | | | | | | | 34, L0662: 34, S0132: | | |
| | | | | | | | 33, H0318: 33, H0622: | | |
| | | | | | | | 32, S0354: 31, H0090: | | |
| | | | | | | | 31, S0372: 31, H0575: | | |
| | | | | | | | 30, H0435: 29, H0641: | | |
| | | | | | | | 27, H0635: 26, S0126: | | |
| | | | | | | | 26, H0457: 25, H0634: | | |
| | | | | | | | 25, H0436: 25, H0423: | | |
| | | | | | | | 25, H0255: 24, H0250: | | |
| | | | | | | | 24, H0069: 22, H0591: | | |
| | | | | | | | 22, S0328: 22, H0509: | | |
| | | | | | | | 21, H0658: 21, L0601: | | |
| | | | | | | | 21, H0179: 20, S0002: | | |
| | | | | | | | 20, S0374: 20, H0648: | | |
| | | | | | | | 20, H0039: 19, L0378: | | |
| | | | | | | | 19, L0663: 19, H0422: | | |
| | | | | | | | 19, S0114: 18, S0116: | | |
| | | | | | | | 18, H0586: 18, S0428: | | |
| | | | | | | | 18, H0672: 18, H0583: | | |
| | | | | | | | 17, H0617: 17, L0748: | | |
| | | | | | | | 17, H0506: 17, L0596: | | |
| | | | | | | | 16, H0580: 15, H0031: | | |
| | | | | | | | 15, L0651: 15, H0619: | | |
| | | | | | | | 14, H0150: 14, L0657: | | |
| | | | | | | | 14, H0593: 14, L0754: | | |
| | | | | | | | 14, H0638: 13, H0063: | | |
| | | | | | | | 13, H0646: 13, L0599: | | |
| | | | | | | | 13, H0663: 12, S0376: | | |
| | | | | | | | 12, H0597: 12, H0644: | | |
| | | | | | | | 12, H0087: 12, L0648: | | |
| | | | | | | | 12, S0052: 12, H0576: | | |
| | | | | | | | 12, L0751: 12, S0026: | | |
| | | | | | | | 12, L0600: 12, T0002: | | |
| | | | | | | | 11, T0049: 11, S0212: | | |
| | | | | | | | 11, H0402: 11, S0356: | | |
| | | | | | | | 11, H0427: 11, H0040: | | |
| | | | | | | | 11, H0264: 11, H0561: | | |
| | | | | | | | 11, S0426: 11, L0653: | | |
| | | | | | | | 11, S0322: 11, S0134: | | |
| | | | | | | | 10, S0218: 10, H0650: | | |
| | | | | | | | 10, H0545: 10, H0510: | | |
| | | | | | | | 10, H0416: 10, S0022: | | |
| | | | | | | | 10, S0146: 10, S0027: | | |
| | | | | | | | 10, H0014: 9, | | |
| | | | | | | | H0188: 9, | | |
| | | | | | | | H0124: 9, L0646: 9, | | |
| | | | | | | | L0374: 9, H0660: 9, | | |
| | | | | | | | S0330: 9, S0044: 9, | | |
| | | | | | | | L0740: 9, H0656: 8, | | |
| | | | | | | | H0341: 8, H0587: 8, | | |
| | | | | | | | H0599: 8, H0036: 8, | | |
| | | | | | | | H0024: 8, S0003: 8, | | |
| | | | | | | | H0560: 8, H0647: 8, | | |
| | | | | | | | L0438: 8, H0670: 8, | | |
| | | | | | | | L0757: 8, S0040: 7, | | |
| | | | | | | | H0559: 7, H0004: 7, | | |
| | | | | | | | H0085: 7, L0483: 7, | | |
| | | | | | | | H0628: 7, L0762: 7, | | |
| | | | | | | | L0647: 7, S0380: 7, | | |
| | | | | | | | S3014: 7, S0011: 7, | | |
| | | | | | | | H0550: 6, H0574: 6, | | |
| | | | | | | | H0618: 6, H0421: 6, | | |
| | | | | | | | H0544: 6, H0050: 6, | | |
| | | | | | | | H0375: 6, T0006: 6, | | |
| | | | | | | | H0553: 6, H0488: 6, | | |
| | | | | | | | S0053: 6, H0682: 6, | | |
| | | | | | | | S0378: 6, H0187: 6, | | |
| | | | | | | | L0750: 6, L0581: 6, | | |
| | | | | | | | H0141: 5, L0785: 5, | | |
| | | | | | | | H0254: 5, H0661: 5, | | |
| | | | | | | | S0140: 5, S0222: 5, | | |
| | | | | | | | H0497: 5, H0632: 5, | | |
| | | | | | | | T0060: 5, H0251: 5, | | |
| | | | | | | | H0596: 5, H0213: 5, | | |
| | | | | | | | H0181: 5, H0598: 5, | | |
| | | | | | | | H0135: 5, H0551: 5, | | |
| | | | | | | | L0369: 5, L0372: 5, | | |
| | | | | | | | L0364: 5, L0375: 5, | | |
| | | | | | | | L0382: 5, S0216: 5, | | |
| | | | | | | | H0689: 5, L0602: 5, | | |
| | | | | | | | L0744: 5, L0439: 5, | | |
| | | | | | | | S0436: 5, H0653: 5, | | |
| | | | | | | | H0665: 5, H0394: 4, | | |
| | | | | | | | H0584: 4, S0046: 4, | | |
| | | | | | | | H0640: 4, H0431: 4, | | |
| | | | | | | | H0592: 4, H0204: 4, | | |
| | | | | | | | H0086: 4, S0051: 4, | | |
| | | | | | | | H0354: 4, H0038: 4, | | |
| | | | | | | | H0059: 4, H0652: 4, | | |
| | | | | | | | L0606: 4, L0783: 4, | | |
| | | | | | | | H0691: 4, H0690: 4, | | |
| | | | | | | | H0683: 4, L0747: 4, | | |
| | | | | | | | H0444: 4, L0603: 4, | | |
| | | | | | | | H0225: 3, H0161: 3, | | |
| | | | | | | | L0808: 3, S0282: 3, | | |
| | | | | | | | H0671: 3, H0459: 3, | | |
| | | | | | | | S0420: 3, H0489: 3, | | |
| | | | | | | | S0045: 3, H0370: 3, | | |
| | | | | | | | H0392: 3, H0590: 3, | | |
| | | | | | | | T0071: 3, H0546: 3, | | |
| | | | | | | | H0373: 3, H0630: 3, | | |
| | | | | | | | H0076: 3, H0284: 3, | | |
| | | | | | | | S0214: 3, H0688: 3, | | |
| | | | | | | | H0604: 3, H0424: 3, | | |
| | | | | | | | L0142: 3, H0032: 3, | | |
| | | | | | | | H0169: 3, H0674: 3, | | |
| | | | | | | | H0376: 3, H0316: 3, | | |
| | | | | | | | H0616: 3, H0477: 3, | | |
| | | | | | | | H0487: 3, H0494: 3, | | |
| | | | | | | | H0649: 3, H0529: 3, | | |
| | | | | | | | L0763: 3, L0769: 3, | | |
| | | | | | | | L0767: 3, L0775: 3, | | |
| | | | | | | | L0607: 3, L0656: 3, | | |
| | | | | | | | L0517: 3, L0542: 3, | | |
| | | | | | | | L0518: 3, L0782: 3, | | |
| | | | | | | | H0144: 3, H0684: 3, | | |
| | | | | | | | H0659: 3, H0666: 3, | | |
| | | | | | | | L0752: 3, S0434: 3, | | |
| | | | | | | | L0591: 3, L0592: 3, | | |
| | | | | | | | L0485: 3, L0362: 3, | | |
| | | | | | | | H0685: 2, H0664: 2, | | |
| | | | | | | | H0306: 2, H0125: 2, | | |
| | | | | | | | S0410: 2, S0300: 2, | | |
| | | | | | | | H0351: 2, H0549: 2, | | |
| | | | | | | | H0492: 2, L0586: 2, | | |
| | | | | | | | H0013: 2, H0191: 2, | | |
| | | | | | | | H0042: 2, H0274: 2, | | |
| | | | | | | | S0474: 2, H0309: 2, | | |
| | | | | | | | H0263: 2, H0235: 2, | | |
| | | | | | | | H0231: 2, H0123: 2, | | |
| | | | | | | | T0003: 2, H0015: 2, | | |
| | | | | | | | H0629: 2, H0060: 2, | | |
| | | | | | | | H0687: 2, H0286: 2, | | |
| | | | | | | | T0023: 2, H0030: 2, | | |
| | | | | | | | H0111: 2, H0182: 2, | | |
| | | | | | | | H0606: 2, H0388: 2, | | |
| | | | | | | | H0189: 2, S0036: 2, | | |
| | | | | | | | H0623: 2, H0102: 2, | | |
| | | | | | | | H0100: 2, L0475: 2, | | |
| | | | | | | | H0625: 2, S0294: 2, | | |
| | | | | | | | L0065: 2, S0438: 2, | | |
| | | | | | | | S0422: 2, L0637: 2, | | |
| | | | | | | | L0627: 2, L0642: 2, | | |
| | | | | | | | L0654: 2, L0527: 2, | | |
| | | | | | | | L0636: 2, L0540: 2, | | |
| | | | | | | | S0174: 2, H0134: 2, | | |
| | | | | | | | S0404: 2, S0406: 2, | | |
| | | | | | | | L0777: 2, L0755: 2, | | |
| | | | | | | | L0758: 2, L0759: 2, | | |
| | | | | | | | S0031: 2, S0308: 2, | | |
| | | | | | | | H0343: 2, L0588: 2, | | |
| | | | | | | | L0605: 2, L0595: 2, | | |
| | | | | | | | L0361: 2, H0668: 2, | | |
| | | | | | | | H0667: 2, S0456: 2, | | |
| | | | | | | | H0395: 1, H0224: 1, | | |
| | | | | | | | H0139: 1, H0159: 1, | | |
| | | | | | | | S0470: 1, S0342: 1, | | |
| | | | | | | | S0402: 1, H0662: 1, | | |
| | | | | | | | H0300: 1, S0442: 1, | | |
| | | | | | | | S0444: 1, H0675: 1, | | |
| | | | | | | | S0408: 1, H0208: 1, | | |
| | | | | | | | H0645: 1, H0393: 1, | | |
| | | | | | | | H0411: 1, H0437: 1, | | |
| | | | | | | | H0369: 1, H0608: 1, | | |
| | | | | | | | H0442: 1, H0409: 1, | | |
| | | | | | | | H0600: 1, H0333: 1, | | |
| | | | | | | | H0331: 1, H0257: 1, | | |
| | | | | | | | L0622: 1, L0623: 1, | | |
| | | | | | | | H0485: 1, N0009: 1, | | |
| | | | | | | | H0101: 1, S0280: 1, | | |
| | | | | | | | H0156: 1, L0021: 1, | | |
| | | | | | | | H0053: 1, H0349: 1, | | |
| | | | | | | | H0025: 1, H0253: 1, | | |
| | | | | | | | H0196: 1, H0194: 1, | | |
| | | | | | | | H0184: 1, L0040: 1, | | |
| | | | | | | | H0327: 1, H0439: 1, | | |
| | | | | | | | H0045: 1, H0041: 1, | | |
| | | | | | | | N0006: 1, H0081: 1, | | |
| | | | | | | | H0620: 1, L0163: 1, | | |
| | | | | | | | T0010: 1, H0083: 1, | | |
| | | | | | | | H0109: 1, H0247: 1, | | |
| | | | | | | | H0266: 1, S0316: 1, | | |
| | | | | | | | H0290: 1, H0292: 1, | | |
| | | | | | | | S0314: 1, S0250: 1, | | |
| | | | | | | | H0252: 1, H0615: 1, | | |
| | | | | | | | H0428: 1, L0194: 1, | | |
| | | | | | | | H0180: 1, L0055: 1, | | |
| | | | | | | | H0165: 1, S0364: 1, | | |
| | | | | | | | H0361: 1, S0366: 1, | | |
| | | | | | | | H0163: 1, H0372: 1, | | |
| | | | | | | | H0433: 1, T0069: 1, | | |
| | | | | | | | L0370: 1, T0041: 1, | | |
| | | | | | | | S0370: 1, S0382: 1, | | |
| | | | | | | | S0306: 1, S0466: 1, | | |
| | | | | | | | S0440: 1, H0538: 1, | | |
| | | | | | | | L0598: 1, L0520: 1, | | |
| | | | | | | | L0640: 1, L0371: 1, | | |
| | | | | | | | L0535: 1, L0631: 1, | | |
| | | | | | | | L0638: 1, L0761: 1, | | |
| | | | | | | | L0630: 1, L0772: 1, | | |
| | | | | | | | L0373: 1, L0641: 1, | | |
| | | | | | | | L0765: 1, L0771: 1, | | |
| | | | | | | | L0521: 1, L0768: 1, | | |
| | | | | | | | L0766: 1, L0386: 1, | | |
| | | | | | | | L0774: 1, L0806: 1, | | |
| | | | | | | | L0652: 1, L0776: 1, | | |
| | | | | | | | L0661: 1, L0628: 1, | | |
| | | | | | | | L0658: 1, L0547: 1, | | |
| | | | | | | | L0546: 1, L0383: 1, | | |
| | | | | | | | L0519: 1, L0545: 1, | | |
| | | | | | | | L0528: 1, T0068: 1, | | |
| | | | | | | | S0148: 1, H0519: 1, | | |
| | | | | | | | S0122: 1, H0579: 1, | | |
| | | | | | | | S0332: 1, S0350: 1, | | : |
| | | | | | | | S0190: 1, S0188: 1, | | |
| | | | | | | | H0214: 1, H0626: 1, | | |
| | | | | | | | H0631: 1, L0611: 1, | | |
| | | | | | | | S0118: 1, S3012: 1, | | |
| | | | | | | | S0028: 1, S0206: 1, | | |
| | | | | | | | L0742: 1, L0743: 1, | | |
| | | | | | | | L0749: 1, L0756: 1, | | |
| | | | | | | | L0753: 1, L0731: 1, | | |
| | | | | | | | S0260: 1, H0595: 1, | | |
| | | | | | | | L0604: 1, L0366: 1, | | |
| | | | | | | | S0106: 1, S0192: 1, | | |
| | | | | | | | S0194: 1, S0452: 1, | | |
| | | | | | | | S0462: 1 | | |
| | | | | | | | and S0384: 1. | | |
| 13 | HTGFY58 | 974198 | 23 | 2-277 | 187 | Arg-1 to Asn-13, | H0521: 174, H0556: | | |
| | | | | | | Tyr-20 to Gly-27. | 138, H0581: 90, | | |
| | | | | | | | S0278: 66, | | |
| | | | | | | | L0665: 66, H0542: | | |
| | | | | | | | 66, S0360: 64, H0543: | | |
| | | | | | | | 61, H0046: 57, S0344: | | |
| | | | | | | | 57, L0659: 55, S0358: | | |
| | | | | | | | 54, H0271: 50, S0142: | | |
| | | | | | | | 49, H0522: 49, S0144: | | |
| | | | | | | | 48, L0664: 46, H0265: | | |
| | | | | | | | 45, H0585: 45, H0657: | | |
| | | | | | | | 42, L0655: 41, H0445: | | |
| | | | | | | | 41, H0555: 37, L0666: | | |
| | | | | | | | 36, H0518: 35, H0486: | | |
| | | | | | | | 34, L0662: 34, S0132: | | |
| | | | | | | | 33, H0318: 33, H0622: | | |
| | | | | | | | 32, S0354: 31, H0090: | | |
| | | | | | | | 31, S0372: 31, H0575: | | |
| | | | | | | | 30, H0435: 29, H0641: | | |
| | | | | | | | 27, H0635: 26, S0126: | | |
| | | | | | | | 26, H0457: 25, H0634: | | |
| | | | | | | | 25, H0436: 25, H0423: | | |
| | | | | | | | 25, H0255: 24, H0250: | | |
| | | | | | | | 24, H0069: 22, H0591: | | |
| | | | | | | | 22, S0328: 22, H0509: | | |
| | | | | | | | 21, H0658: 21, L0601: | | |
| | | | | | | | 21, H0179: 20, S0002: | | |
| | | | | | | | 20, S0374: 20, H0648: | | |
| | | | | | | | 20, H0039: 19, L0378: | | |
| | | | | | | | 19, L0663: 19, H0422: | | |
| | | | | | | | 19, S0114: 18, S0116: | | |
| | | | | | | | 18, H0586: 18, S0428: | | |
| | | | | | | | 18, H0672: 18, H0583: | | |
| | | | | | | | 17, H0617: 17, L0748: | | |
| | | | | | | | 17, H0506: 17, L0596: | | |
| | | | | | | | 16, H0580: 15, H0031: | | |
| | | | | | | | 15, L0651: 15, H0619: | | |
| | | | | | | | 14, H0150: 14, L0657: | | |
| | | | | | | | 14, H0593: 14, L0754: | | |
| | | | | | | | 14, H0638: 13, H0063: | | |
| | | | | | | | 13, H0646: 13, L0599: | | |
| | | | | | | | 13, H0663: 12, S0376: | | |
| | | | | | | | 12, H0597: 12, H0644: | | |
| | | | | | | | 12, H0087: 12, L0648: | | |
| | | | | | | | 12, S0052: 12, H0576: | | |
| | | | | | | | 12, L0751: 12, S0026: | | |
| | | | | | | | 12, L0600: 12, T0002: | | |
| | | | | | | | 11, T0049: 11, S0212: | | |
| | | | | | | | 11, H0402: 11, S0356: | | |
| | | | | | | | 11, H0427: 11, H0040: | | |
| | | | | | | | 11, H0264: 11, H0561: | | |
| | | | | | | | 11, S0426: 11, L0653: | | |
| | | | | | | | 11, S0322: 11, S0134: | | |
| | | | | | | | 10, S0218: 10, H0650: | | |
| | | | | | | | 10, H0545: 10, H0510: | | |
| | | | | | | | 10, H0416: 10, S0022: | | |
| | | | | | | | 10, S0146: 10, S0027: | | |
| | | | | | | | 10, H0014: 9, | | |
| | | | | | | | H0188: 9, | | |
| | | | | | | | H0124: 9, L0646: 9, | | |
| | | | | | | | L0374: 9, H0660: 9, | | |
| | | | | | | | S0330: 9, S0044: 9, | | |
| | | | | | | | L0740: 9, H0656: 8, | | |
| | | | | | | | H0341: 8, H0587: 8, | | |
| | | | | | | | H0599: 8, H0036: 8, | | |
| | | | | | | | H0024: 8, S0003: 8, | | |
| | | | | | | | H0560: 8, H0647: 8, | | |
| | | | | | | | L0438: 8, H0670: 8, | | |
| | | | | | | | L0757: 8, S0040: 7, | | |
| | | | | | | | H0559: 7, H0004: 7, | | |
| | | | | | | | H0085: 7, L0483: 7, | | |
| | | | | | | | H0628: 7, L0762: 7, | | |
| | | | | | | | L0647: 7, S0380: 7, | | |
| | | | | | | | S3014: 7, S0011: 7, | | |
| | | | | | | | H0550: 6, H0574: 6, | | |
| | | | | | | | H0618: 6, H0421: 6, | | |
| | | | | | | | H0544: 6, H0050: 6, | | |
| | | | | | | | H0375: 6, T0006: 6, | | |
| | | | | | | | H0553: 6, H0488: 6, | | |
| | | | | | | | S0053: 6, H0682: 6, | | |
| | | | | | | | S0378: 6, H0187: 6, | | |
| | | | | | | | L0750: 6, L0581: 6, | | |
| | | | | | | | H0141: 5, L0785: 5, | | |
| | | | | | | | H0254: 5, H0661: 5, | | |
| | | | | | | | S0140: 5, S0222: 5, | | |
| | | | | | | | H0497: 5, H0632; 5, | | |
| | | | | | | | T0060: 5, H0251: 5, | | |
| | | | | | | | H0596: 5, H0213: 5, | | |
| | | | | | | | H0181: 5, H0598: 5, | | |
| | | | | | | | H0135: 5, H0551: 5, | | |
| | | | | | | | L0369: 5, L0372: 5, | | |
| | | | | | | | L0364: 5, L0375: 5, | | |
| | | | | | | | L0382: 5, S0216: 5, | | |
| | | | | | | | H0689: 5, L0602: 5, | | |
| | | | | | | | L0744: 5, L0439: 5, | | |
| | | | | | | | S0436: 5, H0653: 5, | | |
| | | | | | | | H0665: 5, H0394: 4, | | |
| | | | | | | | H0584: 4, S0046: 4, | | |
| | | | | | | | H0640: 4, H0431: 4, | | |
| | | | | | | | H0592: 4, H0204: 4, | | |
| | | | | | | | H0086: 4, S0051: 4, | | |
| | | | | | | | H0354: 4, H0038: 4, | | |
| | | | | | | | H0059: 4, H0652: 4, | | |
| | | | | | | | L0606: 4, L0783: 4, | | |
| | | | | | | | H0691: 4, H0690: 4, | | |
| | | | | | | | H0683: 4, L0747: 4, | | |
| | | | | | | | H0444: 4, L0603: 4, | | |
| | | | | | | | H0225: 3, H0161: 3, | | |
| | | | | | | | L0808: 3, S0282: 3, | | |
| | | | | | | | H0671: 3, H0459: 3, | | |
| | | | | | | | S0420: 3, H0489: 3, | | |
| | | | | | | | S0045: 3, H0370: 3, | | |
| | | | | | | | H0392: 3, H0590: 3, | | |
| | | | | | | | T0071: 3, H0546: 3, | | |
| | | | | | | | H0373: 3, H0630: 3, | | |
| | | | | | | | H0076: 3, H0284: 3, | | |
| | | | | | | | S0214: 3, H0688: 3, | | |
| | | | | | | | H0604: 3, H0424: 3, | | |
| | | | | | | | L0142: 3, H0032: 3, | | |
| | | | | | | | H0169: 3, H0674: 3, | | |
| | | | | | | | H0376: 3, H0316: 3, | | |
| | | | | | | | H0616: 3, H0477: 3, | | |
| | | | | | | | H0487: 3, H0494: 3, | | |
| | | | | | | | H0649: 3, H0529: 3, | | |
| | | | | | | | L0763: 3, L0769: 3, | | |
| | | | | | | | L0767: 3, L0775: 3, | | |
| | | | | | | | L0607: 3, L0656: 3, | | |
| | | | | | | | L0517: 3, L0542: 3, | | |
| | | | | | | | L0518: 3, L0782: 3, | | |
| | | | | | | | H0144: 3, H0684: 3, | | |
| | | | | | | | H0659: 3, H0666: 3, | | |
| | | | | | | | L0752: 3, S0434: 3, | | |
| | | | | | | | L0591: 3, L0592: 3, | | |
| | | | | | | | L0485: 3, L0362: 3, | | |
| | | | | | | | H0685: 2, H0664: 2, | | |
| | | | | | | | H0306: 2, H0125: 2, | | |
| | | | | | | | S0410: 2, S0300: 2, | | |
| | | | | | | | H0351: 2, H0549: 2, | | |
| | | | | | | | H0492: 2, L0586: 2, | | |
| | | | | | | | H0013: 2, H0191: 2, | | |
| | | | | | | | H0042: 2, H0274: 2, | | |
| | | | | | | | S0474: 2, H0309: 2, | | |
| | | | | | | | H0263: 2, H0235: 2, | | |
| | | | | | | | H0231: 2, H0123: 2, | | |
| | | | | | | | T0003: 2, H0015: 2, | | |
| | | | | | | | H0629: 2, H0060: 2, | | |
| | | | | | | | H0687: 2, H0286: 2, | | |
| | | | | | | | T0023: 2, H0030: 2, | | |
| | | | | | | | H0111: 2, H0182: 2, | | |
| | | | | | | | H0606: 2, H0388: 2, | | |
| | | | | | | | H0189: 2, S0036: 2, | | |
| | | | | | | | H0623: 2, H0102: 2, | | |
| | | | | | | | H0100: 2, L0475: 2, | | |
| | | | | | | | H0625: 2, S0294: 2, | | |
| | | | | | | | L0065: 2, S0438: 2, | | |
| | | | | | | | S0422: 2, L0637: 2, | | |
| | | | | | | | L0627: 2, L0642: 2, | | |
| | | | | | | | L0654: 2, L0527: 2, | | |
| | | | | | | | L0636: 2, L0540: 2, | | |
| | | | | | | | S0174: 2, H0134: 2, | | |
| | | | | | | | S0404: 2, S0406: 2, | | |
| | | | | | | | L0777: 2, L0755: 2, | | |
| | | | | | | | L0758: 2, L0759: 2, | | |
| | | | | | | | S0031: 2, S0308: 2, | | |
| | | | | | | | H0343: 2, L0588: 2, | | |
| | | | | | | | L0605: 2, L0595: 2, | | |
| | | | | | | | L0361: 2, H0668: 2, | | |
| | | | | | | | H0667: 2, S0456: 2, | | |
| | | | | | | | H0395: 1, H0224: 1, | | |
| | | | | | | | H0139: 1, H0159: 1, | | |
| | | | | | | | S0470: 1, S0342: 1, | | |
| | | | | | | | S0402: 1, H0662: 1, | | |
| | | | | | | | H0300: 1, S0442: 1, | | |
| | | | | | | | S0444: 1, H0675: 1, | | |
| | | | | | | | S0408: 1, H0208: 1, | | |
| | | | | | | | H0645: 1, H0393: 1, | | |
| | | | | | | | H0411: 1, H0437: 1, | | |
| | | | | | | | H0369: 1, H0608: 1, | | |
| | | | | | | | H0442: 1, H0409: 1, | | |
| | | | | | | | H0600: 1, H0333: 1, | | |
| | | | | | | | H0331: 1, H0257: 1, | | |
| | | | | | | | L0622: 1, L0623: 1, | | |
| | | | | | | | H0485: 1, N0009: 1, | | |
| | | | | | | | H0101: 1, S0280: 1, | | |
| | | | | | | | H0156: 1, L0021: 1, | | |
| | | | | | | | H0053: 1, H0349: 1, | | |
| | | | | | | | H0025: 1, H0253: 1, | | |
| | | | | | | | H0196: 1, H0194: 1, | | |
| | | | | | | | H0184: 1, L0040: 1, | | |
| | | | | | | | H0327: 1, H0439: 1, | | |
| | | | | | | | H0045: 1, H0041: 1, | | |
| | | | | | | | N0006: 1, H0081: 1, | | |
| | | | | | | | H0620: 1, L0163: 1, | | |
| | | | | | | | T0010: 1, H0083: 1, | | |
| | | | | | | | H0109: 1, H0247: 1, | | |
| | | | | | | | H0266: 1, S0316: 1, | | |
| | | | | | | | H0290: 1, H0292: 1, | | |
| | | | | | | | S0314: 1, S0250: 1, | | |
| | | | | | | | H0252: 1, H0615: 1, | | |
| | | | | | | | H0428: 1, L0194: 1, | | |
| | | | | | | | H0180: 1, L0055: 1, | | |
| | | | | | | | H0165: 1, S0364: 1, | | |
| | | | | | | | H0361: 1, S0366: 1, | | |
| | | | | | | | H0163: 1, H0372: 1, | | |
| | | | | | | | H0433: 1, T0069: 1, | | |
| | | | | | | | L0370: 1, T0041: 1, | | |
| | | | | | | | S0370: 1, S0382: 1, | | |
| | | | | | | | S0306: 1, S0466: 1, | | |
| | | | | | | | S0440: 1, H0538: 1, | | |
| | | | | | | | L0598: 1, L0520: 1, | | |
| | | | | | | | L0640: 1, L0371: 1, | | |
| | | | | | | | L0535: 1, L0631: 1, | | |
| | | | | | | | L0638: 1, L0761: 1, | | |
| | | | | | | | L0630: 1, L0772: 1, | | |
| | | | | | | | L0373: 1, L0641: 1, | | |
| | | | | | | | L0765: 1, L0771: 1, | | |
| | | | | | | | L0521: 1, L0768: 1, | | |
| | | | | | | | L0766: 1, L0386: 1, | | |
| | | | | | | | L0774: 1, L0806: 1, | | |
| | | | | | | | L0652: 1, L0776: 1, | | |
| | | | | | | | L0661: 1, L0628: 1, | | |
| | | | | | | | L0658: 1, L0547: 1, | | |
| | | | | | | | L0546: 1, L0383: 1, | | |
| | | | | | | | L0519: 1, L0545: 1, | | |
| | | | | | | | L0528: 1, T0068: 1, | | |
| | | | | | | | S0148: 1, H0519: 1, | | |
| | | | | | | | S0122: 1, H0579: 1, | | |
| | | | | | | | S0332: 1, S0350: 1, | | |
| | | | | | | | S0190: 1, S0188: 1, | | |
| | | | | | | | H0214: 1, H0626: 1, | | |
| | | | | | | | H0631: 1, L0611: 1, | | |
| | | | | | | | S0118: 1, S3012: 1, | | |
| | | | | | | | S0028: 1, S0206: 1, | | |
| | | | | | | | L0742: 1, L0743: 1, | | |
| | | | | | | | L0749: 1, L0756: 1, | | |
| | | | | | | | L0753: 1, L0731: 1, | | |
| | | | | | | | S0260: 1, H0595: 1, | | |
| | | | | | | | L0604: 1, L0366: 1, | | |
| | | | | | | | S0106: 1, S0192: 1, | | |
| | | | | | | | S0194: 1, S0452: 1, | | |
| | | | | | | | S0462: 1 | | |
| | | | | | | | and S0384: 1. | | |
| 14 | HTXJB01 | 1124596 | 24 | 55-999 | 188 | Arg-35 to Trp-49. | H0556: 2, H0266: 2, | | |
| | | | | | | | H0265: 1, T0002: 1, | | |
| | | | | | | | H0561: 1 | | |
| | | | | | | | and H0521: 1. | | |
| | | 542372 | 122 | 54-446 | 286 | Arg-35 to Trp-49, | | | |
| | | | | | | Lys-57 to Thr-76, | | | |
| | | | | | | Glu-100 to Arg-108. | | | |
| 15 | HUFAK35 | 636241 | 25 | 1-222 | 189 | | H0586: 1 | | |
| | | | | | | | and H0506: 1. | | |
| 16 | HWHKC91 | 974191 | 26 | 3-410 | 190 | Arg-38 to Glu-43. | H0521: 174, | | |
| | | | | | | | H0556: 138, | | |
| | | | | | | | H0581: 90, S0278: | | |
| | | | | | | | 66, L0665: 66, H0542: | | |
| | | | | | | | 66, S0360: 64, H0543: | | |
| | | | | | | | 61, H0046: 57, S0344: | | |
| | | | | | | | 57, L0659: 55, S0358: | | |
| | | | | | | | 54, H0271: 50, S0142: | | |
| | | | | | | | 49, H0522: 49, S0144: | | |
| | | | | | | | 48, L0664: 46, H0265: | | |
| | | | | | | | 45, H0585: 45, H0657: | | |
| | | | | | | | 42, L0655: 41, H0445: | | |
| | | | | | | | 41, H0555: 37, L0666: | | |
| | | | | | | | 36, H0518: 35, H0486: | | |
| | | | | | | | 34, L0662: 34, S0132: | | |
| | | | | | | | 33, H0318: 33, H0622: | | |
| | | | | | | | 32, S0354: 31, H0090: | | |
| | | | | | | | 31, S0372: 31, H0575: | | |
| | | | | | | | 30, H0435: 29, H0641: | | |
| | | | | | | | 27, H0635: 26, S0126: | | |
| | | | | | | | 26, H0457: 25, H0634: | | |
| | | | | | | | 25, H0436: 25, H0423: | | |
| | | | | | | | 25, H0255: 24, H0250: | | |
| | | | | | | | 24, H0069: 22, H0591: | | |
| | | | | | | | 22, S0328: 22, H0509: | | |
| | | | | | | | 21, H0658: 21, L0601: | | |
| | | | | | | | 21, H0179: 20, S0002: | | |
| | | | | | | | 20, S0374: 20, H0648: | | |
| | | | | | | | 20, H0039: 19, L0378: | | |
| | | | | | | | 19, L0663: 19, H0422: | | |
| | | | | | | | 19, S0114: 18, S0116: | | |
| | | | | | | | 18, H0586: 18, S0428: | | |
| | | | | | | | 18, H0672: 18, H0583: | | |
| | | | | | | | 17, H0617: 17, L0748: | | |
| | | | | | | | 17, H0506: 17, L0596: | | |
| | | | | | | | 16, H0580: 15, H0031: | | |
| | | | | | | | 15, L0651: 15, H0619: | | |
| | | | | | | | 14, H0150: 14, L0657: | | |
| | | | | | | | 14, H0593: 14, L0754: | | |
| | | | | | | | 14, H0638: 13, H0063: | | |
| | | | | | | | 13, H0646: 13, L0599: | | |
| | | | | | | | 13, H0663: 12, S0376: | | |
| | | | | | | | 12, H0597: 12, H0644: | | |
| | | | | | | | 12, H0087: 12, L0648: | | |
| | | | | | | | 12, S0052: 12, H0576: | | |
| | | | | | | | 12, L0751: 12, S0026: | | |
| | | | | | | | 12, L0600: 12, T0002: | | |
| | | | | | | | 11, T0049: 11, S0212: | | |
| | | | | | | | 11, H0402: 11, S0356: | | |
| | | | | | | | 11, H0427: 11, H0040: | | |
| | | | | | | | 11, H0264: 11, H0561: | | |
| | | | | | | | 11, S0426: 11, L0653: | | |
| | | | | | | | 11, S0322: 11, S0134: | | |
| | | | | | | | 10, S0218: 10, H0650: | | |
| | | | | | | | 10, H0545: 10, H0510: | | |
| | | | | | | | 10, H0416: 10, S0022: | | |
| | | | | | | | 10, S0146: 10, S0027: | | |
| | | | | | | | 10, H0014: 9, | | |
| | | | | | | | H0188: 9, | | |
| | | | | | | | H0124: 9, L0646: 9, | | |
| | | | | | | | L0374: 9, H0660: 9, | | |
| | | | | | | | S0330: 9, S0044: 9, | | |
| | | | | | | | L0740: 9, H0656: 8, | | |
| | | | | | | | H0341: 8, H0587: 8, | | |
| | | | | | | | H0599: 8, H0036: 8, | | |
| | | | | | | | H0024: 8, S0003: 8, | | |
| | | | | | | | H0560: 8, H0647: 8, | | |
| | | | | | | | L0438: 8, H0670: 8, | | |
| | | | | | | | L0757: 8, S0040: 7, | | |
| | | | | | | | H0559: 7, H0004: 7, | | |
| | | | | | | | H0085: 7, L0483: 7, | | |
| | | | | | | | H0628: 7, L0762: 7, | | |
| | | | | | | | L0647: 7, S0380: 7, | | |
| | | | | | | | S3014: 7, S0011: 7, | | |
| | | | | | | | H0550: 6, H0574: 6, | | |
| | | | | | | | H0618: 6, H0421: 6, | | |
| | | | | | | | H0544: 6, H0050: 6, | | |
| | | | | | | | H0375: 6, T0006: 6, | | |
| | | | | | | | H0553: 6, H0488: 6, | | |
| | | | | | | | S0053: 6, H0682: 6, | | |
| | | | | | | | S0378: 6, H0187: 6, | | |
| | | | | | | | L0750: 6, L0581: 6, | | |
| | | | | | | | H0141: 5, L0785: 5, | | |
| | | | | | | | H0254: 5, H0661: 5, | | |
| | | | | | | | S0140: 5, S0222: 5, | | |
| | | | | | | | H0497: 5, H0632: 5, | | |
| | | | | | | | T0060: 5, H0251: 5, | | |
| | | | | | | | H0596: 5, H0213: 5, | | |
| | | | | | | | H0181: 5, H0598: 5, | | |
| | | | | | | | H0135: 5, H0551: 5, | | |
| | | | | | | | L0369: 5, L0372: 5, | | |
| | | | | | | | L0364: 5, L0375: 5, | | |
| | | | | | | | L0382: 5, S0216: 5, | | |
| | | | | | | | H0689: 5, L0602: 5, | | |
| | | | | | | | L0744: 5, L0439: 5, | | |
| | | | | | | | S0436: 5, H0653: 5, | | |
| | | | | | | | H0665: 5, H0394: 4, | | |
| | | | | | | | H0584: 4, S0046: 4, | | |
| | | | | | | | H0640: 4, H0431: 4, | | |
| | | | | | | | H0592: 4, H0204: 4, | | |
| | | | | | | | H0086; 4, S0051: 4, | | |
| | | | | | | | H0354: 4, H0038: 4, | | |
| | | | | | | | H0059: 4, H0652: 4, | | |
| | | | | | | | L0606: 4, L0783: 4, | | |
| | | | | | | | H0691: 4, H0690: 4, | | |
| | | | | | | | H0683: 4, L0747: 4, | | |
| | | | | | | | H0444: 4, L0603: 4, | | |
| | | | | | | | H0225: 3, H0161: 3, | | |
| | | | | | | | L0808: 3, S0282: 3, | | |
| | | | | | | | H0671: 3, H0459: 3, | | |
| | | | | | | | S0420: 3, H0489: 3, | | |
| | | | | | | | S0045: 3, H0370: 3, | | |
| | | | | | | | H0392: 3, H0590: 3, | | |
| | | | | | | | T0071: 3, H0546: 3, | | |
| | | | | | | | H0373: 3, H0630: 3, | | |
| | | | | | | | H0076: 3, H0284: 3, | | |
| | | | | | | | S0214: 3, H0688: 3, | | |
| | | | | | | | H0604: 3, H0424: 3, | | |
| | | | | | | | L0142: 3, H0032: 3, | | |
| | | | | | | | H0169: 3, H0674: 3, | | |
| | | | | | | | H0376: 3, H0316: 3, | | |
| | | | | | | | H0616: 3, H0477: 3, | | |
| | | | | | | | H0487: 3, H0494: 3, | | |
| | | | | | | | H0649: 3, H0529: 3, | | |
| | | | | | | | L0763: 3, L0769: 3, | | |
| | | | | | | | L0767: 3, L0775: 3, | | |
| | | | | | | | L0607: 3, L0656: 3, | | |
| | | | | | | | L0517: 3, L0542: 3, | | |
| | | | | | | | L0518: 3, L0782: 3, | | |
| | | | | | | | H0144: 3, H0684: 3, | | |
| | | | | | | | H0659: 3, H0666: 3, | | |
| | | | | | | | L0752: 3, S0434: 3, | | |
| | | | | | | | L0591: 3, L0592: 3, | | |
| | | | | | | | L0485: 3, L0362: 3, | | |
| | | | | | | | H0685: 2, H0664: 2, | | |
| | | | | | | | H0306: 2, H0125: 2, | | |
| | | | | | | | S0410: 2, S0300: 2, | | |
| | | | | | | | H0351: 2, H0549: 2, | | |
| | | | | | | | H0492: 2, L0586: 2, | | |
| | | | | | | | H0013: 2, H0191: 2, | | |
| | | | | | | | H0042: 2, H0274: 2, | | |
| | | | | | | | S0474: 2, H0309: 2, | | |
| | | | | | | | H0263: 2, H0235: 2, | | |
| | | | | | | | H0231: 2, H0123: 2, | | |
| | | | | | | | T0003: 2, H0015: 2, | | |
| | | | | | | | H0629: 2, H0060: 2, | | |
| | | | | | | | H0687: 2, H0286: 2, | | |
| | | | | | | | T0023: 2, H0030: 2, | | |
| | | | | | | | H0111: 2, H0182: 2, | | |
| | | | | | | | H0606: 2, H0388: 2, | | |
| | | | | | | | H0189: 2, S0036: 2, | | |
| | | | | | | | H0623: 2, H0102: 2, | | |
| | | | | | | | H0100: 2, L0475: 2, | | |
| | | | | | | | H0625: 2, S0294: 2, | | |
| | | | | | | | L0065: 2, S0438: 2, | | |
| | | | | | | | S0422: 2, L0637: 2, | | |
| | | | | | | | L0627: 2, L0642: 2, | | |
| | | | | | | | L0654: 2, L0527: 2, | | |
| | | | | | | | L0636: 2, L0540: 2, | | |
| | | | | | | | S0174: 2, H0134: 2, | | |
| | | | | | | | S0404: 2, S0406: 2, | | |
| | | | | | | | L0777: 2, L0755: 2, | | |
| | | | | | | | L0758: 2, L0759: 2, | | |
| | | | | | | | S0031: 2, S0308: 2, | | |
| | | | | | | | H0343: 2, L0588: 2, | | |
| | | | | | | | L0605: 2, L0595: 2, | | |
| | | | | | | | L0361: 2, H0668: 2, | | |
| | | | | | | | H0667: 2, S0456: 2, | | |
| | | | | | | | H0395: 1, H0224: 1, | | |
| | | | | | | | H0139: 1, H0159: 1, | | |
| | | | | | | | S0470: 1, S0342: 1, | | |
| | | | | | | | S0402: 1, H0662: 1, | | |
| | | | | | | | H0300: 1, S0442: 1, | | |
| | | | | | | | S0444: 1, H0675: 1, | | |
| | | | | | | | S0408: 1, H0208: 1, | | |
| | | | | | | | H0645: 1, H0393: 1, | | |
| | | | | | | | H0411: 1, H0437: 1, | | |
| | | | | | | | H0369: 1, H0608: 1, | | |
| | | | | | | | H0442: 1, H0409: 1, | | |
| | | | | | | | H0600: 1, H0333: 1, | | |
| | | | | | | | H0331: 1, H0257: 1, | | |
| | | | | | | | L0622: 1, L0623: 1, | | |
| | | | | | | | H0485: 1, N0009: 1, | | |
| | | | | | | | H0101: 1, S0280: 1, | | |
| | | | | | | | H0156: 1, L0021: 1, | | |
| | | | | | | | H0053: 1, H0349: 1, | | |
| | | | | | | | H0025: 1, H0253: 1, | | |
| | | | | | | | H0196: 1, H0194: 1, | | |
| | | | | | | | H0184: 1, L0040: 1, | | |
| | | | | | | | H0327: 1, H0439: 1, | | |
| | | | | | | | H0045: 1, H0041: 1, | | |
| | | | | | | | N0006: 1, H0081: 1, | | |
| | | | | | | | H0620: 1, L0163: 1, | | |
| | | | | | | | T0010: 1, H0083: 1, | | |
| | | | | | | | H0109: 1, H0247: 1, | | |
| | | | | | | | H0266: 1, S0316: 1, | | |
| | | | | | | | H0290: 1, H0292: 1, | | |
| | | | | | | | S0314: 1, S0250: 1, | | |
| | | | | | | | H0252: 1, H0615: 1, | | |
| | | | | | | | H0428: 1, L0194: 1, | | |
| | | | | | | | H0180: 1, L0055: 1, | | |
| | | | | | | | H0165: 1, S0364: 1, | | |
| | | | | | | | H0361: 1, S0366: 1, | | |
| | | | | | | | H0163: 1, H0372: 1, | | |
| | | | | | | | H0433: 1, T0069: 1, | | |
| | | | | | | | L0370: 1, T0041: 1, | | |
| | | | | | | | S0370: 1, S0382: 1, | | |
| | | | | | | | S0306: 1, S0466: 1, | | |
| | | | | | | | S0440: 1, H0538: 1, | | |
| | | | | | | | L0598: 1, L0520: 1, | | |
| | | | | | | | L0640: 1, L0371: 1, | | |
| | | | | | | | L0535: 1, L0631: 1, | | |
| | | | | | | | L0638: 1, L0761: 1, | | |
| | | | | | | | L0630: 1, L0772: 1, | | |
| | | | | | | | L0373: 1, L0641: 1, | | |
| | | | | | | | L0765: 1, L0771: 1, | | |
| | | | | | | | L0521: 1, L0768: 1, | | |
| | | | | | | | L0766: 1, L0386: 1, | | |
| | | | | | | | L0774: 1, L0806: 1, | | |
| | | | | | | | L0652: 1, L0776: 1, | | |
| | | | | | | | L0661: 1, L0628: 1, | | |
| | | | | | | | L0658: 1, L0547: 1, | | |
| | | | | | | | L0546: 1, L0383: 1, | | |
| | | | | | | | L0519: 1, L0545: 1, | | |
| | | | | | | | L0528: 1, T0068: 1, | | |
| | | | | | | | S0148: 1, H0519: 1, | | |
| | | | | | | | S0122: 1, H0579: 1, | | |
| | | | | | | | S0332: 1, S0350: 1, | | |
| | | | | | | | S0190: 1, S0188: 1, | | |
| | | | | | | | H0214: 1, H0626: 1, | | |
| | | | | | | | H0631: 1, L0611: 1, | | |
| | | | | | | | S0118: 1, S3012: 1, | | |
| | | | | | | | S0028: 1, S0206: 1, | | |
| | | | | | | | L0742: 1, L0743: 1, | | |
| | | | | | | | L0749: 1, L0756: 1, | | |
| | | | | | | | L0753: 1, L0731: 1, | | |
| | | | | | | | S0260: 1, H0595: 1, | | |
| | | | | | | | L0604: 1, L0366: 1, | | |
| | | | | | | | S0106: 1, S0192: 1, | | |
| | | | | | | | S0194: 1, S0452: 1, | | |
| | | | | | | | S0462: 1 | | |
| | | | | | | | and S0384: 1. | | |
| 17 | HTSFJ40 | 1172826 | 27 | 3-515 | 191 | Gly-17 to Gly-33, | AR089: 30, AR061: 6 | | |
| | | | | | | Val-109 to Val-114, | H0081: 1, H0087: 1, | | |
| | | | | | | His-132 to Leu-137, | S0144: 1 | | |
| | | | | | | Leu-158 to Thr-167. | and H0538: 1. | | |
| | | 722406 | 123 | 3-392 | 287 | Leu-7 to Ala-13. | | | |
| 18 | HEONO59 | 741361 | 28 | 325-756 | 192 | | AR089: 5, AR061: 3 | | |
| | | | | | | | H0457: 1 | | |
| | | | | | | | and L0752: 1. | | |
| 19 | HEMBZ62 | 1078797 | 29 | 1-849 | 193 | Arg-29 to Ser-39, | AR089: 6, AR061: 2 | | |
| | | | | | | Glu-108 to Arg-114. | H0663: 2, S0328: 2, | | |
| | | | | | | | S0420: 1, S0046: 1, | | |
| | | | | | | | H0559: 1, T0082: 1, | | |
| | | | | | | | H0050: 1, H0100: 1, | | |
| | | | | | | | H0494: 1, L0640: 1, | | |
| | | | | | | | L0789: 1, H0436: 1 | | |
| | | | | | | | and L0439: 1. | | |
| | | 742551 | 124 | 2-454 | 288 | | | | |
| 20 | HWBAO18 | 751125 | 30 | 1-396 | 194 | Arg-1 to Ser-7, | AR089: 3, AR061: 2 | | |
| | | | | | | Pro-22 to Ala-28, | L0777: 7, L0439: 6, | | |
| | | | | | | Lys-84 to Ala-89, | L0809: 3, S0126: 3, | | |
| | | | | | | Pro-92 to Ala-99. | S0342: 2, H0580: 2, | | |
| | | | | | | | H0581: 2, S0002: 2, | | |
| | | | | | | | L0776: 2, L0438: 2, | | |
| | | | | | | | L0748: 2, L0745: 2, | | |
| | | | | | | | L0749: 2, L0779: 2, | | |
| | | | | | | | L0757: 2, L0759: 2, | | |
| | | | | | | | H0556: 1, H0294: 1, | | |
| | | | | | | | L0415: 1, S0418: 1, | | |
| | | | | | | | H0333: 1, H0559: 1, | | |
| | | | | | | | H0486: 1, H0250: 1, | | |
| | | | | | | | H0505: 1, H0052: 1, | | |
| | | | | | | | H0546: 1, L0471: 1, | | |
| | | | | | | | H0057: 1, H0510: 1, | | |
| | | | | | | | H0266: 1, H0553: 1, | | |
| | | | | | | | H0674: 1, H0488: 1, | | |
| | | | | | | | H0366: 1, H0641: 1, | | |
| | | | | | | | S0142: 1, L0770: 1, | | |
| | | | | | | | L0761: 1, L0641: 1, | | |
| | | | | | | | L0773: 1, L0521: 1, | | |
| | | | | | | | L0766: 1, L0381: 1, | | |
| | | | | | | | L0775: 1, L0653: 1, | | |
| | | | | | | | L0655: 1, L0659: 1, | | |
| | | | | | | | L0542: 1, L0787: 1, | | |
| | | | | | | | L0789: 1, L0666: 1, | | |
| | | | | | | | L0663: 1, H0659: 1, | | |
| | | | | | | | H0670: 1, S0380: 1, | | |
| | | | | | | | H0521: 1, L0747: 1, | | |
| | | | | | | | L0758: 1, S0031: 1, | | |
| | | | | | | | H0445: 1, S0242: 1, | | |
| | | | | | | | H0422: 1 | | |
| | | | | | | | and S0458: 1. | | |
| 21 | HTLEN77 | 1147024 | 31 | 2-940 | 195 | Arg-28 to Thr-33, | AR089: 33, AR061: 18 | | |
| | | | | | | Lys-38 to Ala-69, | L0748: 2 | | |
| | | | | | | Pro-207 to Glu-220, | and H0253: 1. | | |
| | | | | | | Arg-229 to Tyr-235, | | | |
| | | | | | | Pro-237 to Tyr-243, | | | |
| | | | | | | Arg-261 to Ala-269, | | | |
| | | | | | | Gln-288 to Trp-304. | | | |
| | | 772363 | 125 | 90-422 | 289 | Ala-1 to Ala-35. | | | |
| | | | | | | 5. | | | |
| 22 | HTADZ74 | 1172825 | 32 | 1-897 | 196 | Val-26 to Arg-33, | AR050: 18, AR089: 2, | | |
| | | | | | | Arg-93 to Asp-107, | AR061: 2, AR051: 2, | | |
| | | | | | | Leu-142 to Tyr-148, | AR054: 1 | | |
| | | | | | | Val-261 to Thr-268, | S0114: 1, H0069: 1, | | |
| | | | | | | Gly-283 to Trp-299. | H0014: 1, L0667: 1, | | |
| | | | | | | | L0804: 1, L0659: 1, | | |
| | | | | | | | S0052: 1 | | |
| | | | | | | | and H0422: 1. | | |
| | | 811489 | 126 | 23-586 | 290 | Ile-5 to Lys-10, | | | |
| | | | | | | Arg-78 to Asp-92. | | | |
| 23 | HELHB88 | 1226704 | 33 | 256-3360 | 197 | Gln-1 to Thr-7, | AR061: 2, AR089: 2 | | |
| | | | | | | Glu-28 to Gln-35, | L0777: 3, L0794: 2, | | |
| | | | | | | Lys-188 to Lys-207, | S0027: 2, L0748: 2, | | |
| | | | | | | Ser-238 to Gly-245, | L0747: 2, L0601: 2, | | |
| | | | | | | Asp-278 to Gly-283, | S0342: 1, S0212: 1, | | |
| | | | | | | Pro-317 to Ser-324, | S0282: 1, L0004: 1, | | |
| | | | | | | Ser-335 to Glu-342, | S0045: 1, H0581: 1, | | |
| | | | | | | Pro-344 to Lys-355, | T0110: 1, L0471: 1, | | |
| | | | | | | Glu-362 to Asn-373, | S6028: 1, H0551: 1, | | |
| | | | | | | Glu-385 to Arg-393, | H0494: 1, H0509: 1, | | |
| | | | | | | Arg-399 to Gln-417, | L0646: 1, L0665: 1, | | |
| | | | | | | Lys-422 to Gln-457, | H0520: 1, H0547: 1, | | |
| | | | | | | Glu-461 to Glu-477, | S0390: 1, L0591: 1, | | |
| | | | | | | Leu-514 to Gln-529, | L0366: 1 | | |
| | | | | | | Leu-538 to Met-548, | and H0653: 1. | | |
| | | | | | | Gln-562 to Gln-567, | | | |
| | | | | | | Asn-569 to Asp-574, | | | |
| | | | | | | Arg-594 to Gln-609, | | | |
| | | | | | | Asn-626 to Met-636, | | | |
| | | | | | | Ala-638 to Lys-649, | | | |
| | | | | | | Glu-654 to Gln-670, | | | |
| | | | | | | Gln-676 to Leu-716, | | | |
| | | | | | | Ser-736 to Gly-741, | | | |
| | | | | | | Phe-762 to Asp-768, | | | |
| | | | | | | Glu-808 to Val-815, | | | |
| | | | | | | Ser-847 to Trp-856, | | | |
| | | | | | | Asp-858 to Trp-876, | | | |
| | | | | | | Gln-892 to Ala-898, | | | |
| | | | | | | Pro-964 to Arg-974. | | | |
| | | 811935 | 127 | 136-567 | 291 | Arg-1 to His-10. | | | |
| 24 | HE9TD31 | 815845 | 34 | 3-674 | 198 | Ser-119 to Thr-127, | AR089: 0, AR061: 0 | | |
| | | | | | | Gln-134 to Ser-152. | S0354: 1, L0657: 1, | | |
| | | | | | | | H0144: 1 | | |
| | | | | | | | and S0330: 1. | | |
| 25 | HGBDG55 | 815858 | 35 | 26-400 | 199 | Gly-1 to Ala-8, | AR089: 1, AR061: 1 | | |
| | | | | | | Phe-31 to Leu-36, | S0040: 1, H0014: 1, | | |
| | | | | | | Glu-54 to Lys-62, | H0030: 1, H0063: 1, | | |
| | | | | | | Gly-69 to Gly-75, | L0803: 1, H0521: 1 | | |
| | | | | | | Leu-100 to Gly-106. | and S0028: 1. | | |
| 26 | HOUHL51 | 1126480 | 36 | 773-162 | 200 | Pro-5 to Asp-13. | AR061: 6, AR089: 2 | | |
| | | | | | | | L0758: 6, L0794: 3, | | |
| | | | | | | | H0038: 2, L0768: 2, | | |
| | | | | | | | L0790: 2, L0731: 2, | | |
| | | | | | | | S0342: 1, H0664: 1, | | |
| | | | | | | | H0616: 1, S0210: 1, | | |
| | | | | | | | L0773: 1 | | |
| | | 815891 | 128 | 3-527 | 292 | | and L0608: 1. | | |
| 27 | HEOPP67 | 827630 | 37 | 2-448 | 201 | Arg-8 to Arg-17, | AR061: 1, AR089: 0 | | |
| | | | | | | Asp-47 to Val-52, | H0457: 2, H0650: 1 | | |
| | | | | | | Asp-86 to Gly-91. | and H0622: 1. | | |
| 28 | HKAOV71 | 827679 | 38 | 1-732 | 202 | | AR089: 6, AR061: 2 | | |
| | | | | | | | H0013: 2, H0046: 2, | | |
| | | | | | | | H0036: 1, H0590: 1, | | |
| | | | | | | | H0581: 1, H0551: 1 | | |
| | | | | | | | and H0494: 1. | | |
| 29 | HFIJC31 | 828148 | 39 | 72-518 | 203 | Glu-8 to Ile-20, | AR089: 2, AR061: 1 | | |
| | | | | | | Pro-22 to Pro-28, | L0804: 1, L0809: 1, | | |
| | | | | | | Glu-46 to Trp-58. | L0788: 1, H0593: 1, | | |
| | | | | | | | L0756: 1 | | |
| | | | | | | | and S0194: 1. | | |
| 30 | HDQID90 | 831976 | 40 | 221-724 | 204 | | AR089: 7, AR061: 3 | | |
| | | | | | | | L0766: 14, H0521: 4, | | |
| | | | | | | | L0748: 4, L0804: 3, | | |
| | | | | | | | L0776: 3, L0749: 3, | | |
| | | | | | | | L0731: 3, L0485: 3, | | |
| | | | | | | | S0376: 2, H0580: 2, | | |
| | | | | | | | L0483: 2, H0316: 2, | | |
| | | | | | | | S0002: 2, L0803: 2, | | |
| | | | | | | | L0775: 2, L0805: 2, | | |
| | | | | | | | L0659: 2, L0438: 2, | | |
| | | | | | | | H0265: 1, H0686: 1, | | |
| | | | | | | | H0656: 1, H0341: 1, | | |
| | | | | | | | S0212: 1, H0638: 1, | | |
| | | | | | | | H0125: 1, S0360: 1, | | |
| | | | | | | | H0411: 1, S0222: 1, | | |
| | | | | | | | H0409: 1, H0587: 1, | | |
| | | | | | | | H0014: 1, S0003: 1, | | |
| | | | | | | | H0163: 1, H0591: 1, | | |
| | | | | | | | H0488: 1, H0494: 1, | | |
| | | | | | | | H0641: 1, L0598: 1, | | |
| | | | | | | | H0529: 1, L0772: 1, | | |
| | | | | | | | L0764: 1, L0768: 1, | | |
| | | | | | | | L0774: 1, L0655: 1, | | |
| | | | | | | | L0783: 1, L0809: 1, | | |
| | | | | | | | L0792: 1, L0663: 1, | | |
| | | | | | | | L0665: 1, H0702: 1, | | |
| | | | | | | | H0519: 1, S0126: 1, | | |
| | | | | | | | H0682: 1, H0435: 1, | | |
| | | | | | | | H0672: 1, H0704: 1, | | |
| | | | | | | | S3012: 1, L0751: 1, | | |
| | | | | | | | L0750: 1, L0777: 1, | | |
| | | | | | | | L0752: 1, L0757: 1, | | |
| | | | | | | | L0758: 1, L0759: 1, | | |
| | | | | | | | L0362: 1, H0423: 1 | | |
| | | | | | | | and H0506: 1. | | |
| 31 | HKACD80 | 1206594 | 41 | 98-1834 | 205 | Pro-34 to Val-40, | AR089: 12, AR061: 6 | | |
| | | | | | | Thr-65 to Trp-72, | L0766: 4, H0052: 3, | | |
| | | | | | | Val-362 to Gly-367, | L0662: 3, L0776: 3, | | |
| | | | | | | Asp-416 to Met-426, | L0666: 3, L0665: 3, | | |
| | | | | | | Arg-491 to Gln-496, | H0521: 3, H0438: 2, | | |
| | | | | | | Lys-510 to Thr-520, | H0581: 2, H0263: 2, | | |
| | | | | | | Gly-524 to Pro-532, | H0494: 2, L0763: 2, | | |
| | | | | | | Pro-538 to Gln-552. | L0770: 2, L0769: 2, | | |
| | | | | | | | L0649: 2, L0664: 2, | | |
| | | | | | | | L0748: 2, L0439: 2, | | |
| | | | | | | | L0747: 2, S0436: 2, | | |
| | | | | | | | H0265: 1, H0556: 1, | | |
| | | | | | | | S0040: 1, H0656: 1, | | |
| | | | | | | | S0444: 1, S0278: 1, | | |
| | | | | | | | H0415: 1, H0403: 1, | | |
| | | | | | | | H0643: 1, S0280: 1, | | |
| | | | | | | | H0575: 1, H0194: 1, | | |
| | | | | | | | H0309: 1, H0545: 1, | | |
| | | | | | | | H0046: 1, L0157: 1, | | |
| | | | | | | | H0375: 1, L0483: 1, | | |
| | | | | | | | H0553: 1, H0412: 1, | | |
| | | | | | | | H0646: 1, S0002: 1, | | |
| | | | | | | | L0796: 1, L0644: 1, | | |
| | | | | | | | L0764: 1, L0774: 1, | | |
| | | | | | | | L0376: 1, L0806: 1, | | |
| | | | | | | | L0654: 1, L0659: 1, | | |
| | | | | | | | L0383: 1, H0547: 1, | | |
| | | | | | | | S0126: 1, H0684: 1, | | |
| | | | | | | | H0435: 1, H0478: 1, | | |
| | | | | | | | S0028: 1, L0751: 1, | | |
| | | | | | | | L0754: 1, L0749: 1, | | |
| | | | | | | | L0750: 1, L0779: 1, | | |
| | | | | | | | L0759: 1, H0543: 1 | | |
| | | | | | | | and H0423: 1. | | |
| | | 837698 | 129 | 72-536 | 293 | Pro-34 to Val-40, | | | |
| | | | | | | Thr-65 to Asp-70. | | | |
| 32 | HTEED80 | 849075 | 42 | 182-850 | 206 | | AR089: 13, AR061: 12 | | |
| | | | | | | | L0766: 5, L0759: 5, | | |
| | | | | | | | L0794: 3, L0775: 3, | | |
| | | | | | | | L0779: 3, H0038: 2, | | |
| | | | | | | | L0763: 2, L0774: 2, | | |
| | | | | | | | L0518: 2, L0528: 2, | | |
| | | | | | | | L0790: 2, L0665: 2, | | |
| | | | | | | | H0144: 2, H0670: 2, | | |
| | | | | | | | L0599: 2, H0663: 1, | | |
| | | | | | | | S0444: 1, H0486: 1, | | |
| | | | | | | | T0060: 1, H0013: 1, | | |
| | | | | | | | S0280: 1, S0050: 1, | | |
| | | | | | | | S6028: 1, H0615: 1, | | |
| | | | | | | | H0030: 1, H0553: 1, | | |
| | | | | | | | H0634: 1, H0647: 1, | | |
| | | | | | | | H0654: 1, H0529: 1, | | |
| | | | | | | | L0638: 1, L0761: 1, | | |
| | | | | | | | L0771: 1, L0773: 1, | | |
| | | | | | | | L0767: 1, L0387: 1, | | |
| | | | | | | | L0803: 1, L0804: 1, | | |
| | | | | | | | L0607: 1, L0657: 1, | | |
| | | | | | | | L0517: 1, L0809: 1, | | |
| | | | | | | | H0648: 1, H0672: 1, | | |
| | | | | | | | L0748: 1, L0740: 1, | | |
| | | | | | | | L0749: 1, L0756: 1, | | |
| | | | | | | | L0758: 1, L0591: 1, | | |
| | | | | | | | L0592: 1 | | |
| | | | | | | | and H0543: 1. | | |
| 33 | HE8TI39 | 1222770 | 43 | 3-1178 | 207 | Ser-8 to Thr-15, | AR061: 2, AR089: 2 | | |
| | | | | | | Arg-73 to Thr-79, | L0438: 4, L0746: 4, | | |
| | | | | | | Phe-86 to Leu-92, | H0581: 2, H0656: 1, | | |
| | | | | | | Thr-124 to Arg-132, | H0013: 1, L0471: 1, | | |
| | | | | | | Thr-163 to Trp-168, | H0266: 1, H0328: 1, | | |
| | | | | | | Thr-214 to Val-230, | H0553: 1, S0438: 1, | | |
| | | | | | | Arg-257 to Tyr-269, | H0529: 1, L0766: 1, | | |
| | | | | | | Val-346 to Pro-354, | L0805: 1, H0520: 1, | | |
| | | | | | | Asp-356 to Gln-367. | H0521: 1, L0752: 1 | | |
| | | | | | | | and S0192: 1. | | |
| | | 849161 | 130 | 3-470 | 294 | Ser-8 to Thr-15, | | | |
| | | | | | | Arg-73 to Thr-79, | | | |
| | | | | | | Phe-86 to Leu-92. | | | |
| 34 | HSDJH12 | 1163916 | 44 | 3-554 | 208 | Thr-1 to Asp-19, | AR089: 24, AR061: 6 | | |
| | | | | | | Cys-23 to Cys-34, | S0134: 1, L0749: 1, | | |
| | | | | | | Gln-36 to Gln-58, | L0759: 1, S0260: 1 | | |
| | | | | | | Leu-78 to Gly-87, | and L0596: 1. | | |
| | | | | | | Asp-164 to His-169. | | | |
| | | 876344 | 131 | 3-623 | 295 | Thr-1 to Asp-19, | | | |
| | | | | | | Cys-23 to Cys-34, | | | |
| | | | | | | Gln-36 to Gln-58, | | | |
| | | | | | | Leu-78 to Gly-87, | | | |
| | | | | | | Asp-164 to His-169. | | | |
| 35 | HE8PY29 | 887862 | 45 | 2-277 | 209 | Asp-28 to Ser-36, | AR061: 2, AR089: 1 | | |
| | | | | | | Glu-47 to Gln-60, | H0013: 1 | | |
| | | | | | | Phe-68 to Gly-77, | and S0126: 1. | | |
| | | | | | | Pro-81 to Val-86. | | | |
| 36 | HNTMB90 | 910934 | 46 | 3-533 | 210 | Pro-18 to Pro-27, | AR051: 2, AR050: 1, | | |
| | | | | | | Leu-34 to Lys-39, | AR054: 1, AR061: 1, | | |
| | | | | | | Lys-90 to Pro-95. | AR089: 1 | | |
| | | | | | | | H0519: 2, H0046: 1, | | |
| | | | | | | | L0803: 1, H0520: 1 | | |
| | | | | | | | and L0758: 1. | | |
| 37 | HMKCH92 | 910936 | 47 | 78-704 | 211 | Pro-32 to Glu-37, | AR089: 1, AR061: 1 | 3p26-p25 | 154705, |
| | | | | | | Gly-56 to Ser-61, | L0439: 4, H0392: 1 | | 193300, |
| | | | | | | Gly-144 to Arg-149, | and L0749: 1. | | 193300, |
| | | | | | | Glu-161 to Gly-168, | | | 227646, |
| | | | | | | Thr-182 to Lys-187. | | | 253260, |
| | | | | | | | | | 278720, |
| | | | | | | | | | 601154, |
| | | | | | | | | | 601253, |
| | | | | | | | | | 602011 |
| 38 | HTELV86 | 1126499 | 48 | 1545-178 | 212 | | AR089: 7, AR061: 6 | | |
| | | | | | | | H0616: 4, H0038: 1, | | |
| | | | | | | | L0745: 1 | | |
| | | | | | | | and L0779: 1. | | |
| | | 910946 | 132 | 1-927 | 296 | Thr-5 to Ser-11, | | | |
| | | | | | | Asp-78 to His-85, | | | |
| | | | | | | Ser-153 to Ser-162, | | | |
| | | | | | | Glu-221 to Ala-234, | | | |
| | | | | | | Gly-247 to Glu-252. | | | |
| 39 | HNTAF23 | 910947 | 49 | 24-251 | 213 | His-1 to Gly-12, | AR089: 2, AR061: 1 | | |
| | | | | | | Trp-69 to Glu-75. | L0439: 4, S0192: 3, | | |
| | | | | | | | L0776: 2, L0438: 2, | | |
| | | | | | | | L0777: 2, H0254: 1, | | |
| | | | | | | | L0534: 1, H0333: 1, | | |
| | | | | | | | L0763: 1, H0519: 1, | | |
| | | | | | | | H0593: 1, L0750: 1, | | |
| | | | | | | | L0779: 1 | | |
| | | | | | | | and L0758: 1. | | |
| 40 | HNBUT01 | 1025375 | 50 | 126-746 | 214 | Pro-12 to Leu-19, | AR089: 15, AR061: 5 | | |
| | | | | | | Pro-43 to Ser-55, | S0360: 2, L0766: 2, | | |
| | | | | | | His-72 to Ser-80, | L0747: 2, T0002: 1, | | |
| | | | | | | Pro-98 to Pro-104, | H0686: 1, H0662: 1, | | |
| | | | | | | Asn-117 to Ile-124, | S0046: 1, H0023: 1, | | |
| | | | | | | Gly-129 to Ile-137, | H0560: 1, H0647: 1, | | |
| | | | | | | Ser-177 to Leu-201. | L0662: 1, L0666: 1, | | |
| | | | | | | | H0576: 1, L0779: 1, | | |
| | | | | | | | L0596: 1, L0590: 1, | | |
| | | | | | | | L0601: 1 | | |
| | | | | | | | and H0667: 1. | | |
| | | 913838 | 133 | 3-827 | 297 | Arg-1 to Gly-10. | | | |
| 41 | HEMFI21 | 1128266 | 51 | 1-1503 | 215 | Thr-27 to Arg-32, | AR061: 4, AR089: 3 | | |
| | | | | | | Gly-63 to Gly-71, | L0794: 4, S0376: 3, | | |
| | | | | | | Ile-95 to Gly-101, | L0596: 3, H0266: 2, | | |
| | | | | | | Asn-108 to Ser-115, | S0003: 2, H0553: 2, | | |
| | | | | | | Pro-174 to Pro-179, | H0616: 2, H0551: 2, | | |
| | | | | | | Asp-185 to Ser-197, | L0665: 2, S0028: 2, | | |
| | | | | | | Phe-209 to Glu-216, | L0747: 2, L0779: 2, | | |
| | | | | | | Ile-220 to Lys-227, | L0759: 2, S0046: 1, | | |
| | | | | | | Asp-243 to Glu-248, | H0574: 1, H0013: 1, | | |
| | | | | | | Arg-282 to Gly-287, | H0427: 1, H0156: 1, | | |
| | | | | | | Glu-298 to Cys-303, | H0046: 1, H0050: 1, | | |
| | | | | | | Lys-332 to Pro-356, | H0031: 1, H0212: 1, | | |
| | | | | | | Lys-363 to Tyr-372, | L0455: 1, H0598: 1, | | |
| | | | | | | Glu-378 to Thr-398, | H0625: 1, H0509: 1, | | |
| | | | | | | Ser-402 to Asp-409, | S0422: 1, L0521: 1, | | |
| | | | | | | Ile-413 to Ile-420, | L0766: 1, L0803: 1, | | |
| | | | | | | Glu-437 to Arg-501. | L0653: 1, L0659: 1, | | |
| | | | | | | | L0809: 1, L0789: 1, | | |
| | | | | | | | L0666: 1, H0659: 1, | | |
| | | | | | | | H0539: 1, S0174: 1, | | |
| | | | | | | | L0777: 1, L0758: 1, | | |
| | | | | | | | L0599: 1 | | |
| | | | | | | | and L0462: 1. | | |
| | | 917436 | 134 | 1-1503 | 298 | Thr-27 to Arg-32, | | | |
| | | | | | | Gly-63 to Gly-71, | | | |
| | | | | | | Ile-95 to Gly-101, | | | |
| | | | | | | Asn-108 to Ser-115. | | | |
| 42 | HMSOL52 | 921126 | 52 | 90-473 | 216 | Glu-29 to Gly-35, | AR061: 5, AR089: 2 | | |
| | | | | | | Arg-53 to Pro-59, | L0770: 4, L0803: 4, | | |
| | | | | | | Thr-88 to Met-99, | H0638: 1, H0123: 1, | | |
| | | | | | | Pro-109 to Asp-118. | S0426: 1, L0662: 1, | | |
| | | | | | | | H0648: 1, L0747: 1, | | |
| | | | | | | | L0756: 1, L0779: 1, | | |
| | | | | | | | L0752: 1 | | |
| | | | | | | | and L0759: 1. | | |
| 43 | HHGAE47 | 922194 | 53 | 3-503 | 217 | Gly-25 to Arg-45, | AR061: 3, AR089: 2 | | |
| | | | | | | Asp-53 to Glu-60, | L0769: 5, L0774: 5, | | |
| | | | | | | Asp-66 to Lys-72, | L0756: 4, H0624: 2, | | |
| | | | | | | Arg-89 to Trp-106, | S0358: 2, S0444: 2, | | |
| | | | | | | Asn-121 to Gly-147, | S0408: 2, H0587: 2, | | |
| | | | | | | Val-152 to Gly-159, | L0764: 2, L0766: 2, | | |
| | | | | | | Ala-161 to Ser-166. | L0775: 2, L0601: 2, | | |
| | | | | | | | H0170: 1, S0442: 1, | | |
| | | | | | | | S0410: 1, H0497: 1, | | |
| | | | | | | | H0333: 1, H0632: 1, | | |
| | | | | | | | H0156: 1, L0022: 1, | | |
| | | | | | | | L0738: 1, H0271: 1, | | |
| | | | | | | | H0039: 1, S0344: 1, | | |
| | | | | | | | L0637: 1, L0772: 1, | | |
| | | | | | | | L0646: 1, L0773: 1, | | |
| | | | | | | | L0662: 1, L0518: 1, | | |
| | | | | | | | L0783: 1, L0791: 1, | | |
| | | | | | | | L0663: 1, S0374: 1, | | |
| | | | | | | | H0593: 1, H0660: 1, | | |
| | | | | | | | H0648: 1, H0672: 1, | | |
| | | | | | | | H0696: 1, L0749: 1, | | |
| | | | | | | | L0750: 1, L0779: 1, | | |
| | | | | | | | L0752: 1, L0755: 1, | | |
| | | | | | | | L0599: 1 | | |
| | | | | | | | and H0667: 1. | | |
| 44 | HMCGL45 | 922195 | 54 | 442-885 | 218 | Gln-1 to Glu-10, | AR061: 8, AR089: 5 | | |
| | | | | | | Asp-16 to Lys-22, | L0769: 5, L0774: 5, | | |
| | | | | | | Pro-39 to Arg-46, | L0756: 4, H0624: 2, | | |
| | | | | | | Lys-73 to Lys-79, | S0358: 2, S0444: 2, | | |
| | | | | | | Asp-89 to Gly-94, | S0408: 2, H0587: 2, | | |
| | | | | | | Ala-124 to Tyr-134. | L0764: 2, L0766: 2, | | |
| | | | | | | | L0775: 2, L0601: 2, | | |
| | | | | | | | H0170: 1, S0442: 1, | | |
| | | | | | | | S0410: 1, H0497: 1, | | |
| | | | | | | | H0333: 1, H0632: 1, | | |
| | | | | | | | H0156: 1, L0022: 1, | | |
| | | | | | | | L0738: 1, H0271: 1, | | |
| | | | | | | | H0039: 1, S0344: 1, | | |
| | | | | | | | L0637: 1, L0772: 1, | | |
| | | | | | | | L0646: 1, L0773: 1, | | |
| | | | | | | | L0662: 1, L0518: 1, | | |
| | | | | | | | L0783: 1, L0791: 1, | | |
| | | | | | | | L0663: 1, S0374: 1, | | |
| | | | | | | | H0593: 1, H0660: 1, | | |
| | | | | | | | H0648: 1, H0672: 1, | | |
| | | | | | | | H0696: 1, L0749: 1, | | |
| | | | | | | | L0750: 1, L0779: 1, | | |
| | | | | | | | L0752: 1, L0755: 1, | | |
| | | | | | | | L0599: 1 | | |
| | | | | | | | and H0667: 1. | | |
| 45 | HEOQN14 | 923752 | 55 | 1044-520 | 219 | | AR089: 15, AR061: 7 | | |
| 46 | HSOBC04 | 927280 | 56 | 2-388 | 220 | Asn-59 to Glu-67. | AR061: 5, AR089: 2 | | |
| | | | | | | | L0747: 14, H0551: 9, | | |
| | | | | | | | H0617: 7, S0022: 6, | | |
| | | | | | | | H0135: 6, S3014: 6, | | |
| | | | | | | | L0750: 6, L0757: 6, | | |
| | | | | | | | L0759: 6, H0545: 5, | | |
| | | | | | | | S0126: 5, H0124: 4, | | |
| | | | | | | | H0529: 4, L0769: 4, | | |
| | | | | | | | L0764: 4, L0665: 4, | | |
| | | | | | | | H0547: 4, S3012: 4, | | |
| | | | | | | | L0740: 4, L0731: 4, | | |
| | | | | | | | H0624: 3, H0294: 3, | | |
| | | | | | | | L0717: 3, H0251: 3, | | |
| | | | | | | | H0024: 3, S0250: 3, | | |
| | | | | | | | H0100: 3, L0375: 3, | | |
| | | | | | | | L0651: 3, L0758: 3, | | |
| | | | | | | | H0170: 2, S0040: 2, | | |
| | | | | | | | H0583: 2, H0550: 2, | | |
| | | | | | | | H0333: 2, H0041: 2, | | |
| | | | | | | | H0012: 2, H0620: 2, | | |
| | | | | | | | H0284: 2, H0553: 2, | | |
| | | | | | | | H0606: 2, H0130: 2, | | |
| | | | | | | | L0641: 2, L0662: 2, | | |
| | | | | | | | L0650: 2, L0783: 2, | | |
| | | | | | | | L0666: 2, L0664: 2, | | |
| | | | | | | | L0744: 2, L0439: 2, | | |
| | | | | | | | L0751: 2, L0755: 2, | | |
| | | | | | | | H0667: 2, S0418: 1, | | |
| | | | | | | | S0354: 1, S0222: 1, | | |
| | | | | | | | H0441: 1, H0370: 1, | | |
| | | | | | | | T0109: 1, H0156: 1, | | |
| | | | | | | | H0318: 1, H0544: 1, | | |
| | | | | | | | H0546: 1, H0123: 1, | | |
| | | | | | | | L0471: 1, T0003: 1, | | |
| | | | | | | | H0014: 1, T0010: 1, | | |
| | | | | | | | H0266: 1, S0312: 1, | | |
| | | | | | | | H0428: 1, H0048: 1, | | |
| | | | | | | | H0413: 1, H0059: 1, | | |
| | | | | | | | H0560: 1, S0150: 1, | | |
| | | | | | | | H0633: 1, S0210: 1, | | |
| | | | | | | | L0770: 1, L0639: 1, | | |
| | | | | | | | L0772: 1, L0773: 1, | | |
| | | | | | | | L0768: 1, L0649: 1, | | |
| | | | | | | | L0775: 1, L0653: 1, | | |
| | | | | | | | L0776: 1, L0657: 1, | | |
| | | | | | | | L0656: 1, L0659: 1, | | |
| | | | | | | | L0526: 1, L0384: 1, | | |
| | | | | | | | L0809: 1, T0068: 1, | | |
| | | | | | | | H0593: 1, H0689: 1, | | |
| | | | | | | | H0435: 1, H0660: 1, | | |
| | | | | | | | S0330: 1, H0539: 1, | | |
| | | | | | | | S0152: 1, L0743: 1, | | |
| | | | | | | | L0777: 1, H0595: 1, | | |
| | | | | | | | L0591: 1, L0601: 1, | | |
| | | | | | | | S0192: 1, S0242: 1, | | |
| | | | | | | | S0194: 1, S0196: 1 | | |
| | | | | | | | and H0352: 1. | | |
| 47 | HTXKL86 | 1212283 | 57 | 1-1107 | 221 | Glu-15 to Gly-20, | AR061: 1, AR089: 1 | | |
| | | | | | | Gly-73 to Ser-79, | L0438: 12, L0439: 11, | | |
| | | | | | | Val-149 to Val-154, | H0617: 5, H0556: 4, | | |
| | | | | | | His-172 to Leu-177, | H0618: 3, H0253: 3, | | |
| | | | | | | Leu-198 to Lys-207, | L0769: 3, L0761: 3, | | |
| | | | | | | Asn-280 to Phe-285. | L0759: 3, H0544: 2, | | |
| | | | | | | | H0031: 2, H0135: 2, | | |
| | | | | | | | H0038: 2, H0641: 2, | | |
| | | | | | | | L0764: 2, L0783: 2, | | |
| | | | | | | | L0809: 2, L0790: 2, | | |
| | | | | | | | L0666: 2, L0663: 2, | | |
| | | | | | | | L0665: 2, H0144: 2, | | |
| | | | | | | | S0330: 2, L0751: 2, | | |
| | | | | | | | L0779: 2, H0543: 2, | | |
| | | | | | | | H0265: 1, H0685: 1, | | |
| | | | | | | | H0657: 1, H0306: 1, | | |
| | | | | | | | S0420: 1, S0354: 1, | | |
| | | | | | | | S0360: 1, S0046: 1, | | |
| | | | | | | | L0717: 1, H0550: 1, | | |
| | | | | | | | H0592: 1, H0333: 1, | | |
| | | | | | | | H0331: 1, H0559: 1, | | |
| | | | | | | | H0486: 1, H0013: 1, | | |
| | | | | | | | H0244: 1, H0635: 1, | | |
| | | | | | | | H0575: 1, H0596: 1, | | |
| | | | | | | | T0110: 1, H0123: 1, | | |
| | | | | | | | H0615: 1, H0033: 1, | | |
| | | | | | | | H0553: 1, H0212: 1, | | |
| | | | | | | | H0124: 1, H0040: 1, | | |
| | | | | | | | H0616: 1, H0264: 1, | | |
| | | | | | | | H0488: 1, H0100: 1, | | |
| | | | | | | | H0494: 1, H0131: 1, | | |
| | | | | | | | H0529: 1, L0637: 1, | | |
| | | | | | | | L0772: 1, L0766: 1, | | |
| | | | | | | | L0775: 1, L0375: 1, | | |
| | | | | | | | L0776: 1, L0628: 1, | | |
| | | | | | | | L0657: 1, L0664: 1, | | |
| | | | | | | | S0374: 1, H0547: 1, | | |
| | | | | | | | H0593: 1, S3014: 1, | | |
| | | | | | | | S0027: 1, L0748: 1, | | |
| | | | | | | | L0750: 1, L0731: 1, | | |
| | | | | | | | L0758: 1, H0595: 1, | | |
| | | | | | | | S0276: 1 | | |
| | | | | | | | and H0423: 1. | | |
| | | 928194 | 135 | 1-762 | 299 | | | | |
| 48 | HUJCT05 | 1125408 | 58 | 1241-39 | 222 | Pro-16 to Asn-22. | AR089: 8, AR061: 4 | | |
| | | | | | | | H0653: 2, H0650: 1, | | |
| | | | | | | | H0050: 1, L0370: 1, | | |
| | | | | | | | L0800: 1, L0662: 1, | | |
| | | | | | | | L0653: 1, H0436: 1 | | |
| | | | | | | | and L0749: 1. | | |
| | | 929264 | 136 | 2-520 | 300 | Lys-10 to Leu-15, | | | |
| | | | | | | Ser-20 to Val-25, | | | |
| | | | | | | Asp-58 to Thr-64, | | | |
| | | | | | | Asp-125 to Asn-130. | | | |
| 49 | HBGMR22 | 1171965 | 59 | 820-263 | 223 | | AR089: 1, AR061: 0 | | |
| | | | | | | | H0617: 2 | | |
| | | 933922 | 137 | 300-596 | 301 | | and S0278: 1. | | |
| 50 | HHFOC79 | 935406 | 60 | 3-443 | 224 | Glu-6 to Glu-15, | AR051: 14, AR089: 6, | | |
| | | | | | | Thr-21 to Asp-28, | AR061: 4, AR050: 2, | | |
| | | | | | | Ser-42 to Lys-47. | AR054: 2 | | |
| | | | | | | | L0744: 9, L0747: 8, | | |
| | | | | | | | S3014: 7, L0740: 7, | | |
| | | | | | | | S0192: 6, S0027: 5, | | |
| | | | | | | | S0212: 4, H0124: 4, | | |
| | | | | | | | L0731: 4, L0662: 3, | | |
| | | | | | | | L0743: 3, L0752: 3, | | |
| | | | | | | | L0759: 3, H0662: 2, | | |
| | | | | | | | S0418: 2, S0046: 2, | | |
| | | | | | | | H0575: 2, H0545: 2, | | |
| | | | | | | | H0041: 2, H0413: 2, | | |
| | | | | | | | L0775: 2, H0696: 2, | | |
| | | | | | | | S0037: 2, L0748: 2, | | |
| | | | | | | | L0751: 2, L0754: 2, | | |
| | | | | | | | L0749: 2, L0758: 2, | | |
| | | | | | | | H0445: 2, S0276: 2, | | |
| | | | | | | | H0624: 1, L0778: 1, | | |
| | | | | | | | L0005: 1, H0645: 1, | | |
| | | | | | | | H0441: 1, H0391: 1, | | |
| | | | | | | | S0005: 1, T0040: 1, | | |
| | | | | | | | H0069: 1, H0427: 1, | | |
| | | | | | | | S0280: 1, H0042: 1, | | |
| | | | | | | | T0048: 1, H0505: 1, | | |
| | | | | | | | H0309: 1, H0544: 1, | | |
| | | | | | | | H0009: 1, H0266: 1, | | |
| | | | | | | | H0617: 1, H0412: 1, | | |
| | | | | | | | H0623: 1, T0004: 1, | | |
| | | | | | | | L0564: 1, T0041: 1, | | |
| | | | | | | | H0494: 1, H0633: 1, | | |
| | | | | | | | H0646: 1, H0652: 1, | | |
| | | | | | | | L0769: 1, L0646: 1, | | |
| | | | | | | | L0655: 1, L0659: 1, | | |
| | | | | | | | L0546: 1, L0783: 1, | | |
| | | | | | | | L0809: 1, H0144: 1, | | |
| | | | | | | | L0565: 1, S0126: 1, | | |
| | | | | | | | H0689: 1, H0435: 1, | | |
| | | | | | | | H0659: 1, H0672: 1, | | |
| | | | | | | | S0378: 1, H0555: 1, | | |
| | | | | | | | S0206: 1, L0777: 1, | | |
| | | | | | | | L0780: 1, S0434: 1, | | |
| | | | | | | | S0011: 1, S0194: 1 | | |
| | | | | | | | and H0506: 1. | | |
| 51 | HMTBB17 | 1125265 | 61 | 549-121 | 225 | Arg-9 to Arg-18. | AR089: 3, AR061: 3 | | |
| | | | | | | | L0438: 3, L0439: 3, | | |
| | | | | | | | L0749: 3, L0758: 3, | | |
| | | | | | | | L0766: 2, L0375: 2, | | |
| | | | | | | | L0731: 2, L0759: 2, | | |
| | | | | | | | L0803: 1, L0655: 1, | | |
| | | | | | | | L0517: 1, L0666: 1, | | |
| | | | | | | | L0664: 1, H0518: 1, | | |
| | | | | | | | L0748: 1, L0779: 1, | | |
| | | | | | | | L0599: 1 | | |
| | | | | | | | and H0008: 1. | | |
| | | 950884 | 138 | 513-100 | 302 | Arg-34 to Pro-39, | | | |
| | | | | | | Pro-41 to Gly-53, | | | |
| | | | | | | Ile-64 to Ile-77, | | | |
| | | | | | | Asp-85 to Gly-90, | | | |
| | | | | | | Ser-121 to Asn-128. | | | |
| 52 | HKGDE58 | 1125264 | 62 | 3-491 | 226 | Asp-1 to Cys-10, | AR089: 2, AR061: 2 | | |
| | | | | | | Glu-31 to Pro-38, | H0538: 1, L0803: 1 | | |
| | | | | | | Met-43 to Val-48, | and L0731: 1. | | |
| | | | | | | Asp-97 to Phe-110, | | | |
| | | | | | | Asp-119 to Gly-137, | | | |
| | | | | | | Ser-154 to Ile-160. | | | |
| | | 945039 | 139 | 11-937 | 303 | Asp-17 to Cys-26, | | | |
| | | | | | | Glu-47 to Pro-54, | | | |
| | | | | | | Met-59 to Val-64, | | | |
| | | | | | | Asp-113 to Phe-126, | | | |
| | | | | | | Asp-135 to Gly-153. | | | |
| | | 950885 | 140 | 469-119 | 304 | Ser-20 to Gly-32, | | | |
| | | | | | | Ile-43 to Ile-56, | | | |
| | | | | | | Asp-64 to Gly-69, | | | |
| | | | | | | Ser-100 to Asn-107. | | | |
| 53 | HCHMW40 | 1129560 | 63 | 540-1 | 227 | Phe-1 to Trp-6, | AR089: 9, AR061: 4 | | |
| | | | | | | Ser-41 to Arg-56. | H0586: 14, H0587: 8, | | |
| | | | | | | | L0763: 6, H0592: 4, | | |
| | | | | | | | H0484: 3, H0081: 3, | | |
| | | | | | | | H0063: 3, H0483: 2, | | |
| | | | | | | | H0664: 2, H0601: 1, | | |
| | | | | | | | H0600: 1, H0494: 1, | | |
| | | | | | | | L0648: 1, H0658: 1, | | |
| | | | | | | | S0328: 1 | | |
| | | 951518 | 141 | 84-572 | 305 | Ser-7 to Gly-14, | and L0747: 1. | | |
| | | | | | | Leu-22 to Ala-28, | | | |
| | | | | | | Thr-57 to Ser-62. | | | |
| 54 | HE8QZ34 | 1086807 | 64 | 3-1025 | 228 | Ser-85 to Arg-90, | AR089: 4, AR061: 1 | | |
| | | | | | | His-99 to Met-105, | H0046: 4, H0591: 2, | | |
| | | | | | | Met-119 to Val-125, | T0067: 2, L0766: 2, | | |
| | | | | | | Lys-127 to Ile-133, | H0144: 2, H0521: 2, | | |
| | | | | | | Lys-215 to Tyr-221, | L0744: 2, L0439: 2, | | |
| | | | | | | Phe-239 to Lys-247, | H0170: 1, H0013: 1, | | |
| | | | | | | Asn-293 to Gly-298. | H0599: 1, S0182: 1, | | |
| | | | | | | | H0051: 1, H0510: 1, | | |
| | | | | | | | S6028: 1, L0455: 1, | | |
| | | | | | | | H0616: 1, S0422: 1, | | |
| | | | | | | | S0374: 1, L0438: 1, | | |
| | | | | | | | S0390: 1, L0748: 1 | | |
| | | | | | | | and L0604: 1. | | |
| | | 952283 | 142 | 3-1025 | 306 | Ser-85 to Arg-90, | | | |
| | | | | | | His-99 to Met-105, | | | |
| | | | | | | Met-119 to Val-125, | | | |
| | | | | | | Lys-127 to Ile-133, | | | |
| | | | | | | Lys-215 to Tyr-221, | | | |
| | | | | | | Phe-239 to Lys-247, | | | |
| | | | | | | Asn-293 to Gly-298. | | | |
| 55 | HE8TM80 | 1185770 | 65 | 358-891 | 229 | Arg-1 to Asn-7, | AR089: 9, AR061: 7 | | |
| | | | | | | Leu-56 to Met-61. | H0040: 5, H0547: 5, | | |
| | | | | | | | S0152: 5, L0593: 5, | | |
| | | | | | | | L0595: 5, H0551: 4, | | |
| | | | | | | | H0529: 4, H0519: 4, | | |
| | | | | | | | H0560: 3, H0561: 3, | | |
| | | | | | | | H0657: 2, S0360: 2, | | |
| | | | | | | | S0007: 2, H0586: 2, | | |
| | | | | | | | H0013: 2, H0494: 2, | | |
| | | | | | | | L0809: 2, H0435: 2, | | |
| | | | | | | | S0028: 2, L0748: 2, | | |
| | | | | | | | L0439: 2, L0731: 2, | | |
| | | | | | | | L0759: 2, H0445: 2, | | |
| | | | | | | | L0592: 2, H0542: 2, | | |
| | | | | | | | H0624: 1, H0170: 1, | | |
| | | | | | | | H0556: 1, S0212: 1, | | |
| | | | | | | | H0663: 1, S0418: 1, | | |
| | | | | | | | S0356: 1, S0046: 1, | | |
| | | | | | | | H0393: 1, H0486: 1, | | |
| | | | | | | | H0427: 1, H0156: 1, | | |
| | | | | | | | H0036: 1, H0318: 1, | | |
| | | | | | | | T0110: 1, H0545: 1, | | |
| | | | | | | | H0014: 1, H0266: 1, | | |
| | | | | | | | H0188: 1, S0022: 1, | | |
| | | | | | | | H0328: 1, H0688: 1, | | |
| | | | | | | | T0023: 1, H0032: 1, | | |
| | | | | | | | H0038: 1, H0268: 1, | | |
| | | | | | | | S0142: 1, S0422: 1, | | |
| | | | | | | | S0426: 1, L0761: 1, | | |
| | | | | | | | L0646: 1, L0765: 1, | | |
| | | | | | | | L0773: 1, L0794: 1, | | |
| | | | | | | | L0766: 1, L0804: 1, | | |
| | | | | | | | L0776: 1, L0655: 1, | | |
| | | | | | | | L0659: 1, L0791: 1, | | |
| | | | | | | | L0792: 1, L0663: 1, | | |
| | | | | | | | L0664: 1, H0666: 1, | | |
| | | | | | | | H0672: 1, H0539: 1, | | |
| | | | | | | | H0555: 1, L0743: 1, | | |
| | | | | | | | L0740: 1, L0749: 1, | | |
| | | | | | | | L0779: 1, L0752: 1, | | |
| | | | | | | | S0026: 1, S0194: 1, | | |
| | | | | | | | H0543: 1, H0423: 1 | | |
| | | | | | | | and S0424: 1. | | |
| | | 955022 | 143 | 358-696 | 307 | Arg-1 to Asn-7, | | | |
| | | | | | | Leu-56 to Met-61. | | | |
| 56 | HHEFL55 | 957539 | 66 | 2-826 | 230 | Thr-23 to Gln-29, | AR089: 1, AR061: 0 | | |
| | | | | | | Asp-37 to Gly-50, | L0748: 7, L0747: 7, | | |
| | | | | | | Pro-78 to Thr-84, | L0777: 7, L0731: 7, | | |
| | | | | | | Pro-87 to Ala-97, | L0803: 6, S0212: 4, | | |
| | | | | | | Gly-166 to Gln-174. | L0751: 4, L0754: 4, | | |
| | | | | | | | S0358: 3, L0794: 3, | | |
| | | | | | | | L0517: 3, L0809: 3, | | |
| | | | | | | | H0144: 3, H0663: 2, | | |
| | | | | | | | S0038: 2, L0637: 2, | | |
| | | | | | | | L0771: 2, L0775: 2, | | |
| | | | | | | | L0526: 2, L0783: 2, | | |
| | | | | | | | L0790: 2, L0744: 2, | | |
| | | | | | | | L0439: 2, L0752: 2, | | |
| | | | | | | | L0758: 2, L0594: 2, | | |
| | | | | | | | L0603: 2, H0624: 1, | | |
| | | | | | | | S0007: 1, H0393: 1, | | |
| | | | | | | | H0549: 1, H0586: 1, | | |
| | | | | | | | H0333: 1, L0477: 1, | | |
| | | | | | | | S0010: 1, H0581: 1, | | |
| | | | | | | | H0052: 1, H0567: 1, | | |
| | | | | | | | H0571: 1, H0011: 1, | | |
| | | | | | | | H0012: 1, H0620: 1, | | |
| | | | | | | | H0083: 1, H0099: 1, | | |
| | | | | | | | H0266: 1, H0615: 1, | | |
| | | | | | | | H0688: 1, L0483: 1, | | |
| | | | | | | | H0553: 1, H0628: 1, | | |
| | | | | | | | H0135: 1, H0038: 1, | | |
| | | | | | | | H0616: 1, H0087: 1, | | |
| | | | | | | | H0264: 1, H0412: 1, | | |
| | | | | | | | T0041: 1, T0042: 1, | | |
| | | | | | | | H0494: 1, H0396: 1, | | |
| | | | | | | | H0647: 1, L0770: 1, | | |
| | | | | | | | L0662: 1, L0768: 1, | | |
| | | | | | | | L0766: 1, L0804: 1, | | |
| | | | | | | | L0806: 1, L0805: 1, | | |
| | | | | | | | L0776: 1, L0657: 1, | | |
| | | | | | | | L0558: 1, L0792: 1, | | |
| | | | | | | | L0663: 1, H0520: 1, | | |
| | | | | | | | H0519: 1, H0658: 1, | | |
| | | | | | | | H0670: 1, H0672: 1, | | |
| | | | | | | | S0328: 1, S0378: 1, | | |
| | | | | | | | S0380: 1, L0779: 1, | | |
| | | | | | | | H0667: 1, S0192: 1 | | |
| | | | | | | | and H0542: 1. | | |
| 57 | HWLEY40 | 1172021 | 67 | 3-1100 | 231 | Glu-12 to Gly-17, | AR089: 2, AR061: 2 | | |
| | | | | | | Gly-70 to Ser-76, | L0438: 12, L0439: 11, | | |
| | | | | | | Val-146 to Val-151, | H0617: 5, H0556: 4, | | |
| | | | | | | His-169 to Leu-174, | H0618: 3, H0253: 3, | | |
| | | | | | | Leu-195 to Lys-204, | L0769: 3, L0761: 3, | | |
| | | | | | | Asn-277 to Phe-282. | L0759: 3, H0544: 2, | | |
| | | | | | | | H0031: 2, H0135: 2, | | |
| | | | | | | | H0038: 2, H0641: 2, | | |
| | | | | | | | L0764: 2, L0783: 2, | | |
| | | | | | | | L0809: 2, L0790: 2, | | |
| | | | | | | | L0666: 2, L0663: 2, | | |
| | | | | | | | L0665: 2, H0144: 2, | | |
| | | | | | | | S0330: 2, L0751: 2, | | |
| | | | | | | | L0779: 2, H0543: 2, | | |
| | | | | | | | H0265: 1, H0685: 1, | | |
| | | | | | | | H0657: 1, H0306: 1, | | |
| | | | | | | | S0420: 1, S0354: 1, | | |
| | | | | | | | S0360: 1, S0046: 1, | | |
| | | | | | | | L0717: 1, H0550: 1, | | |
| | | | | | | | H0592: 1, H0333: 1, | | |
| | | | | | | | H0331: 1, H0559: 1, | | |
| | | | | | | | H0486: 1, H0013: 1, | | |
| | | | | | | | H0244: 1, H0635: 1, | | |
| | | | | | | | H0575: 1, H0596: 1, | | |
| | | | | | | | T0110: 1, H0123: 1, | | |
| | | | | | | | H0615: 1, H0033: 1, | | |
| | | | | | | | H0553: 1, H0212: 1, | | |
| | | | | | | | H0124: 1, H0040: 1, | | |
| | | | | | | | H0616: 1, H0264: 1, | | |
| | | | | | | | H0488: 1, H0100: 1, | | |
| | | | | | | | H0494: 1, H0131: 1, | | |
| | | | | | | | H0529: 1, L0637: 1, | | |
| | | | | | | | L0772: 1, L0766: 1, | | |
| | | | | | | | L0775: 1, L0375: 1, | | |
| | | | | | | | L0776: 1, L0628: 1, | | |
| | | | | | | | L0657: 1, L0664: 1, | | |
| | | | | | | | S0374: 1, H0547: 1, | | |
| | | | | | | | H0593: 1, S3014: 1, | | |
| | | | | | | | S0027: 1, L0748: 1, | | |
| | | | | | | | L0750: 1, L0731: 1, | | |
| | | | | | | | L0758: 1, H0595: 1, | | |
| | | | | | | | S0276: 1 | | |
| | | 957875 | 144 | 3-881 | 308 | Glu-6 to Gly-11, | and H0423: 1. | | |
| | | | | | | Gly-64 to Ser-70, | | | |
| | | | | | | Val-140 to Val-145, | | | |
| | | | | | | His-163 to Leu-168, | | | |
| | | | | | | Leu-189 to Lys-198, | | | |
| | | | | | | Ser-221 to Thr-227, | | | |
| | | | | | | His-261 to Pro-270. | | | |
| 58 | HHAWC08 | 1088146 | 68 | 338-3 | 232 | Ser-41 to Gly-48, | AR061: 0, AR089: 0 | | |
| | | | | | | Asp-59 to Asp-65, | H0052: 2, L0439: 2, | | |
| | | | | | | Pro-102 to Gly-108. | S0418: 1, H0619: 1, | | |
| | | | | | | | S0280: 1 | | |
| | | | | | | | and L0438: 1. | | |
| | | 957942 | 145 | 172-1047 | 309 | Pro-14 to Gly-32, | | | |
| | | | | | | Pro-73 to Glu-83, | | | |
| | | | | | | Phe-92 to Ser-100, | | | |
| | | | | | | Glu-141 to Asp-148, | | | |
| | | | | | | Thr-159 to Gln-166, | | | |
| | | | | | | Asp-198 to Pro-204, | | | |
| | | | | | | Thr-242 to Val-248. | | | |
| 59 | HCEHD66 | 959160 | 69 | 2-583 | 233 | Arg-1 to Lys-13, | AR061: 7, AR089: 3 | | |
| | | | | | | Leu-20 to Gln-32, | L0769: 9, S0051: 4, | | |
| | | | | | | Asp-77 to Gly-82, | H0441: 3, S0036: 3, | | |
| | | | | | | Gly-99 to Lys-104, | L0809: 3, L0789: 3, | | |
| | | | | | | Asp-113 to Tyr-119, | L0438: 3, L0439: 3, | | |
| | | | | | | Leu-142 to Val-153, | L0731: 3, H0052: 2, | | |
| | | | | | | Glu-172 to Asp-150. | H0687: 2, H0181: 2, | | |
| | | | | | | | L0800: 2, L0794: 2, | | |
| | | | | | | | L0665: 2, L0741: 2, | | |
| | | | | | | | L0742: 2, L0756: 2, | | |
| | | | | | | | S0031: 2, H0171: 1, | | |
| | | | | | | | H0556: 1, S6024: 1, | | |
| | | | | | | | S0029: 1, H0411: 1, | | |
| | | | | | | | S0278: 1, H0455: 1, | | |
| | | | | | | | H0486: 1, L0109: 1, | | |
| | | | | | | | H0251: 1, L0163: 1, | | |
| | | | | | | | H0617: 1, H0413: 1, | | |
| | | | | | | | L0762: 1, L0638: 1, | | |
| | | | | | | | L0639: 1, L0761: 1, | | |
| | | | | | | | L0764: 1, L0662: 1, | | |
| | | | | | | | L0774: 1, L0807: 1, | | |
| | | | | | | | L0657: 1, S0053: 1, | | |
| | | | | | | | S0126: 1, H0626: 1, | | |
| | | | | | | | L0747: 1, L0757: 1, | | |
| | | | | | | | L0759: 1, L0597: 1 | | |
| | | | | | | | and L0608: 1. | | |
| 60 | HMSGF27 | 1206683 | 70 | 61-1455 | 234 | Pro-28 to His-39, | AR089: 12, AR061: 8 | | |
| | | | | | | Thr-69 to Trp-76, | L0766: 4, H0052: 3, | | |
| | | | | | | Leu-166 to Asn-171, | L0662: 3, L0776: 3, | | |
| | | | | | | Val-248 to Gly-253, | L0666: 3, L0665: 3, | | |
| | | | | | | Asp-302 to Met-312, | H0521: 3, H0438: 2, | | |
| | | | | | | Arg-377 to Gln-382, | H0581: 2, H0263: 2, | | |
| | | | | | | Lys-396 to Thr-406, | H0494: 2, L0763: 2, | | |
| | | | | | | Gly-410 to Pro-418, | L0770: 2, L0769: 2, | | |
| | | | | | | Pro-424 to Gln-438. | L0649: 2, L0664: 2, | | |
| | | | | | | | L0748: 2, L0439: 2, | | |
| | | | | | | | L0747: 2, S0436: 2, | | |
| | | | | | | | H0265: 1, H0556: 1, | | |
| | | | | | | | S0040: 1, S0444: 1, | | |
| | | | | | | | S0278: 1, H0415: 1, | | |
| | | | | | | | H0403: 1, H0643: 1, | | |
| | | | | | | | S0280: 1, H0575: 1, | | |
| | | | | | | | H0194: 1, H0309: 1, | | |
| | | | | | | | H0545: 1, H0046: 1, | | |
| | | | | | | | L0157: 1, H0375: 1, | | |
| | | | | | | | L0483: 1, H0553: 1, | | |
| | | | | | | | H0412: 1, H0646: 1, | | |
| | | | | | | | S0002: 1, L0796: 1, | | |
| | | | | | | | L0644: 1, L0764: 1, | | |
| | | | | | | | L0774: 1, L0376: 1, | | |
| | | | | | | | L0806: 1, L0654: 1, | | |
| | | | | | | | L0659: 1, L0383: 1, | | |
| | | | | | | | S0126: 1, H0684: 1, | | |
| | | | | | | | H0435: 1, H0478: 1, | | |
| | | | | | | | S0028: 1, L0751: 1, | | |
| | | | | | | | L0754: 1, L0749: 1, | | |
| | | | | | | | L0750: 1, L0779: 1, | | |
| | | | | | | | L0759: 1, H0543: 1 | | |
| | | | | | | | and H0423: 1. | | |
| | | 962420 | 146 | 3-332 | 310 | Arg-1 to Asp-6, | | | |
| | | | | | | Ala-47 to Pro-58. | | | |
| 61 | HBGMG39 | 971414 | 71 | 1-195 | 235 | Pro-1 to Asn-14, | AR089: 1, AR061: 0 | | |
| | | | | | | Lys-17 to Phe-23, | L0659: 12, L0769: 10, | | |
| | | | | | | Met-44 to Tyr-50. | L0666: 8, L0747: 8, | | |
| | | | | | | | L0759: 7, L0439: 6, | | |
| | | | | | | | L0757: 6, L0756: 5, | | |
| | | | | | | | L0770: 4, L0761: 4, | | |
| | | | | | | | L0663: 4, L0665: 4, | | |
| | | | | | | | H0521: 4, L0749: 4, | | |
| | | | | | | | L0750: 4, L0777: 4, | | |
| | | | | | | | L0758: 4, H0550: 3, | | |
| | | | | | | | H0486: 3, H0544: 3, | | |
| | | | | | | | H0623: 3, L0662: 3, | | |
| | | | | | | | L0794: 3, L0766: 3, | | |
| | | | | | | | L0774: 3, L0664: 3, | | |
| | | | | | | | L0740: 3, L0779: 3, | | |
| | | | | | | | H0423: 3, S0418: 2, | | |
| | | | | | | | S0360: 2, L0717: 2, | | |
| | | | | | | | H0549: 2, H0618: 2, | | |
| | | | | | | | H0581: 2, H0545: 2, | | |
| | | | | | | | H0510: 2, H0617: 2, | | |
| | | | | | | | L0763: 2, L0772: 2, | | |
| | | | | | | | L0642: 2, L0764: 2, | | |
| | | | | | | | L0775: 2, L0655: 2, | | |
| | | | | | | | L0789: 2, S0374: 2, | | |
| | | | | | | | H0658: 2, H0522: 2, | | |
| | | | | | | | H0631: 2, L0745: 2, | | |
| | | | | | | | L0731: 2, H0556: 1, | | |
| | | | | | | | T0049: 1, H0656: 1, | | |
| | | | | | | | L0785: 1, H0483: 1, | | |
| | | | | | | | H0661: 1, H0664: 1, | | |
| | | | | | | | H0662: 1, S0420: 1, | | |
| | | | | | | | S0354: 1, S0358: 1, | | |
| | | | | | | | H0580: 1, S0468: 1, | | |
| | | | | | | | S0132: 1, S0222: 1, | | |
| | | | | | | | H0441: 1, H0586: 1, | | |
| | | | | | | | H0587: 1, H0497: 1, | | |
| | | | | | | | H0069: 1, H0427: 1, | | |
| | | | | | | | S0280: 1, H0046: 1, | | |
| | | | | | | | H0457: 1, H0081: 1, | | |
| | | | | | | | H0024: 1, T0010: 1, | | |
| | | | | | | | H0594: 1, H0188: 1, | | |
| | | | | | | | H0687: 1, H0553: 1, | | |
| | | | | | | | H0124: 1, H0494: 1, | | |
| | | | | | | | H0641: 1, S0422: 1, | | |
| | | | | | | | S0002: 1, S0426: 1, | | |
| | | | | | | | L0372: 1, L0646: 1, | | |
| | | | | | | | L0374: 1, L0648: 1, | | |
| | | | | | | | L0649: 1, L0803: 1, | | |
| | | | | | | | L0651: 1, L0653: 1, | | |
| | | | | | | | L0656: 1, L0635: 1, | | |
| | | | | | | | L0542: 1, L0526: 1, | | |
| | | | | | | | L0783: 1, L0809: 1, | | |
| | | | | | | | L0647: 1, L0791: 1, | | |
| | | | | | | | L0792: 1, H0698: 1, | | |
| | | | | | | | H0699: 1, H0693: 1, | | |
| | | | | | | | H0547: 1, H0689: 1, | | |
| | | | | | | | H0690: 1, H0683: 1, | | |
| | | | | | | | H0670: 1, S0378: 1, | | |
| | | | | | | | S0152: 1, H0555: 1, | | |
| | | | | | | | H0436: 1, S0392: 1, | | |
| | | | | | | | L0742: 1, L0751: 1, | | |
| | | | | | | | L0780: 1, H0668: 1, | | |
| | | | | | | | H0653: 1, S0242: 1, | | |
| | | | | | | | H0542: 1, H0543: 1 | | |
| | | | | | | | and S0460: 1. | | |
| 62 | HTTCT34 | 1097598 | 72 | 3-635 | 236 | Phe-86 to Tyr-94, | AR061: 5, AR089: 2 | | |
| | | | | | | Val-149 to Lys-155. | H0040: 3 | | |
| | | 973210 | 147 | 3-1049 | 311 | Phe-86 to Tyr-94, | | | |
| | | | | | | Val-149 to Lys-155, | | | |
| | | | | | | Trp-169 to Asn-179, | | | |
| | | | | | | Thr-189 to Glu-197. | | | |
| 63 | HAWAM69 | 943104 | 73 | 1010-1441 | 237 | Cys-38 to Gly-43, | AR054: 334, AR050: | | |
| | | | | | | Gly-70 to Pro-82, | 251, AR051: 249, | | |
| | | | | | | Arg-129 to Glu-134, | AR061: 6, AR089: 6 | | |
| | | | | | | Gly-139 to Gly-144. | L0758: 12, L0662: 11, | | |
| | | | | | | | H0251: 9, L0731: 9, | | |
| | | | | | | | S0360: 5, H0013: 5, | | |
| | | | | | | | L0659: 5, L0747: 5, | | |
| | | | | | | | H0252: 4, H0328: 4, | | |
| | | | | | | | L0666: 4, L0439: 4, | | |
| | | | | | | | H0135: 3, L0764: 3, | | |
| | | | | | | | L0783: 3, L0749: 3, | | |
| | | | | | | | S0358: 2, L0776: 2, | | |
| | | | | | | | L0663: 2, H0651: 2, | | |
| | | | | | | | L0744: 2, L0754: 2, | | |
| | | | | | | | H0675: 1, H0329: 1, | | |
| | | | | | | | H0619: 1, L0717: 1, | | |
| | | | | | | | H0369: 1, H0550: 1, | | |
| | | | | | | | H0333: 1, H0632: 1, | | |
| | | | | | | | H0486: 1, T0060: 1, | | |
| | | | | | | | H0042: 1, H0575: 1, | | |
| | | | | | | | H0618: 1, H0150: 1, | | |
| | | | | | | | H0123: 1, H0050: 1, | | |
| | | | | | | | H0105: 1, T0003: 1, | | |
| | | | | | | | H0024: 1, H0510: 1, | | |
| | | | | | | | H0594: 1, H0028: 1, | | |
| | | | | | | | H0644: 1, S0364: 1, | | |
| | | | | | | | S0366: 1, H0591: 1, | | |
| | | | | | | | H0100: 1, L0763: 1, | | |
| | | | | | | | L0631: 1, L0637: 1, | | |
| | | | | | | | L0646: 1, L0641: 1, | | |
| | | | | | | | L0644: 1, L0649: 1, | | |
| | | | | | | | L0803: 1, L0775: 1, | | |
| | | | | | | | L0782: 1, L0809: 1, | | |
| | | | | | | | L0519: 1, L0793: 1, | | |
| | | | | | | | L0665: 1, H0144: 1, | | |
| | | | | | | | L0438: 1, H0684: 1, | | |
| | | | | | | | H0672: 1, S0380: 1, | | |
| | | | | | | | L0748: 1, L0759: 1, | | |
| | | | | | | | L0596: 1, L0366: 1, | | |
| | | | | | | | L0600: 1 | | |
| | | | | | | | and H0352: 1. | | |
| | | 973465 | 148 | 154-2 | 312 | Leu-23 to Gly-32, | | | |
| | | | | | | Lys-34 to Lys-40. | | | |
| 64 | HMTAV95 | 614936 | 74 | 3-281 | 238 | Asp-1 to Ile-6, | AR089: 0, AR061: 0 | | |
| | | | | | | Trp-13 to Glu-21, | H0518: 2 | | |
| | | | | | | Met-27 to Lys-34, | | | |
| | | | | | | Ala-50 to Thr-56. | | | |
| 65 | HSXCB49 | 1172424 | 75 | 459-85 | 239 | | AR051: 6, AR061: 1, | | |
| | | | | | | | AR089: 0 | | |
| | | | | | | | S0036: 2 | | |
| | | 800501 | 149 | 459-85 | 313 | | | | |
| | | 909820 | 150 | 40-273 | 314 | Lys-7 to His-19. | | | |
| 66 | HTEON29 | 1126522 | 76 | 1204-653 | 240 | Pro-39 to Ala-47, | AR061: 6, AR089: 3 | | |
| | | | | | | Ser-150 to Asn-156. | H0038: 4, L0758: 3, | | |
| | | | | | | | H0616: 2, L0794: 2, | | |
| | | | | | | | L0747: 2, L0803: 1, | | |
| | | | | | | | L0789: 1 | | |
| | | | | | | | and L0590: 1. | | |
| | | 815852 | 151 | 2-520 | 315 | Pro-27 to Ala-35. | | | |
| 67 | HHFGP83 | 1174826 | 77 | 199-1692 | 241 | Gly-10 to Gly-17. | AR089: 12, AR061: 9 | | |
| | | | | | | | L0731: 9, L0665: 6, | | |
| | | | | | | | H0024: 4, L0745: 4, | | |
| | | | | | | | L0747: 4, L0662: 3, | | |
| | | | | | | | L0794: 3, H0550: 2, | | |
| | | | | | | | H0081: 2, H0012: 2, | | |
| | | | | | | | S0022: 2, H0100: 2, | | |
| | | | | | | | L0769: 2, L0764: 2, | | |
| | | | | | | | L0659: 2, H0520: 2, | | |
| | | | | | | | L0777: 2, L0759: 2, | | |
| | | | | | | | H0685: 1, S0040: 1, | | |
| | | | | | | | S0354: 1, H0351: 1, | | |
| | | | | | | | H0392: 1, H0586: 1, | | |
| | | | | | | | L0021: 1, H0253: 1, | | |
| | | | | | | | L0157: 1, H0123: 1, | | |
| | | | | | | | H0050: 1, L0471: 1, | | |
| | | | | | | | H0328: 1, H0615: 1, | | |
| | | | | | | | H0063: 1, L0598: 1, | | |
| | | | | | | | L0770: 1, L0638: 1, | | |
| | | | | | | | L0521: 1, L0768: 1, | | |
| | | | | | | | L0776: 1, L0629: 1, | | |
| | | | | | | | L0657: 1, L0783: 1, | | |
| | | | | | | | L0809: 1, L0666: 1, | | |
| | | | | | | | L0663: 1, S0148: 1, | | |
| | | | | | | | H0670: 1, H0134: 1 | | |
| | | | | | | | and L0779: 1. | | |
| | | 828162 | 152 | 2-304 | 316 | Gly-1 to Pro-22, | | | |
| | | | | | | Glu-24 to Thr-30. | | | |
| 68 | HTEKS20 | 1123458 | 78 | 1075-509 | 242 | Pro-9 to Arg-14, | AR061: 2, AR089: 1 | | |
| | | | | | | Phe-34 to Ile-39, | L0758: 14, H0038: 5, | | |
| | | | | | | Arg-41 to Lys-47, | L0779: 4, L0794: 2 | | |
| | | | | | | Leu-49 to Gly-55, | and H0616: 1. | | |
| | | | | | | Lys-104 to Lys-110, | | | |
| | | | | | | Asp-119 to Gly-124. | | | |
| | | 846714 | 153 | 3-569 | 317 | Pro-9 to Arg-14, | | | |
| | | | | | | Phe-34 to Ile-39, | | | |
| | | | | | | Arg-41 to Lys-47, | | | |
| | | | | | | Leu-49 to Gly-55, | | | |
| | | | | | | Lys-104 to Lys-110, | | | |
| | | | | | | Asp-119 to Gly-124. | | | |
| 69 | HCHAT01 | 1202214 | 79 | 2-2443 | 243 | Ser-6 to Ser-14, | AR089: 1, AR061: 0 | | |
| | | | | | | Ser-20 to Ala-37, | L0439: 12, L0748: 11, | | |
| | | | | | | Gln-52 to Glu-61, | L0751: 11, L0769: 7, | | |
| | | | | | | Glu-133 to Glu-144, | H0046: 6, L0756: 6, | | |
| | | | | | | Leu-234 to Gln-239, | L0775: 5, L0666: 5, | | |
| | | | | | | Ser-334 to Ala-340, | L0747: 5, L0770: 4, | | |
| | | | | | | Leu-378 to Lys-383, | L0438: 4, L0740: 4, | | |
| | | | | | | Met-424 to Ser-431, | L0777: 4, H0617: 3, | | |
| | | | | | | Leu-472 to Asp-477, | L0662: 3, L0774: 3, | | |
| | | | | | | Thr-529 to His-564, | L0776: 3, H0521: 3, | | |
| | | | | | | Lys-571 to Ile-580, | S0037: 3, L0749: 3, | | |
| | | | | | | Pro-584 to Gln-590, | L0731: 3, L0757: 3, | | |
| | | | | | | Asp-605 to Asp-610, | L0758: 3, S0212: 2, | | |
| | | | | | | Ala-634 to Cys-643, | S0222: 2, H0586: 2, | | |
| | | | | | | Glu-646 to His-656. | H0587: 2, H0333: 2, | | |
| | | | | | | | H0156: 2, H0052: 2, | | |
| | | | | | | | S0388: 2, H0290: 2, | | |
| | | | | | | | L0640: 2, L0521: 2, | | |
| | | | | | | | L0766: 2, L0375: 2, | | |
| | | | | | | | L0659: 2, L0783: 2, | | |
| | | | | | | | H0144: 2, H0539: 2, | | |
| | | | | | | | L0755: 2, H0445: 2, | | |
| | | | | | | | L0596: 2, L0599: 2, | | |
| | | | | | | | H0149: 1, S0342: 1, | | |
| | | | | | | | H0294: 1, S0114: 1, | | |
| | | | | | | | H0484: 1, H0483: 1, | | |
| | | | | | | | H0664: 1, H0638: 1, | | |
| | | | | | | | S0418: 1, S0420: 1, | | |
| | | | | | | | L0005: 1, S0046: 1, | | |
| | | | | | | | S0300: 1, H0549: 1, | | |
| | | | | | | | H0550: 1, H0370: 1, | | |
| | | | | | | | H0497: 1, H0331: 1, | | |
| | | | | | | | H0486: 1, H0575: 1, | | |
| | | | | | | | S0010: 1, H0434: 1, | | |
| | | | | | | | H0327: 1, H0457: 1, | | |
| | | | | | | | H0041: 1, H0081: 1, | | |
| | | | | | | | H0620: 1, H0024: 1, | | |
| | | | | | | | H0057: 1, H0051: 1, | | |
| | | | | | | | H0083: 1, H0266: 1, | | |
| | | | | | | | H0188: 1, S0250: 1, | | |
| | | | | | | | H0688: 1, H0644: 1, | | |
| | | | | | | | H0674: 1, S0366: 1, | | |
| | | | | | | | H0087: 1, H0116: 1, | | |
| | | | | | | | H0488: 1, H0494: 1, | | |
| | | | | | | | H0131: 1, S0150: 1, | | |
| | | | | | | | H0633: 1, H0649: 1, | | |
| | | | | | | | H0652: 1, L0369: 1, | | |
| | | | | | | | L0638: 1, L0646: 1, | | |
| | | | | | | | L0641: 1, L0771: 1, | | |
| | | | | | | | L0773: 1, L0653: 1, | | |
| | | | | | | | L0658: 1, L0809: 1, | | |
| | | | | | | | L0789: 1, L0663: 1, | | |
| | | | | | | | L0664: 1, H0693: 1, | | |
| | | | | | | | H0520: 1, S0126: 1, | | |
| | | | | | | | H0682: 1, H0659: 1, | | |
| | | | | | | | S0330: 1, H0696: 1, | | |
| | | | | | | | S0174: 1, H0555: 1, | | |
| | | | | | | | S3012: 1, S0028: 1, | | |
| | | | | | | | L0742: 1, L0744: 1, | | |
| | | | | | | | L0745: 1, L0750: 1, | | |
| | | | | | | | L0786: 1, L0779: 1, | | |
| | | | | | | | L0752: 1, S0434: 1, | | |
| | | | | | | | L0366: 1, H0542: 1, | | |
| | | | | | | | H0423: 1 | | |
| | | | | | | | and H0352: 1. | | |
| | | 867209 | 154 | 771-1556 | 318 | Ser-20 to Ala-26, | | | |
| | | | | | | Leu-64 to Lys-69, | | | |
| | | | | | | Met-110 to Ser-117, | | | |
| | | | | | | Leu-158 to Asp-163. | | | |
| 70 | HAPNZ77 | 1171962 | 80 | 3-707 | 244 | Lys-84 to Gln-89, | AR089: 70, AR061: | | |
| | | | | | | Asp-105 to Ala-110, | 14, AR050: 9, AR051: | | |
| | | | | | | Glu-124 to Lys-129, | 1, AR054: 1 | | |
| | | | | | | Lys-167 to Asn-173. | L0766: 2, H0575: 1, | | |
| | | | | | | | H0264: 1, L0761: 1 | | |
| | | | | | | | and L0804: 1. | | |
| | | 887072 | 155 | 1-483 | 319 | Lys-82 to Gln-87, | | | |
| | | | | | | Asp-103 to Ala-108, | | | |
| | | | | | | Glu-122 to Lys-127. | | | |
| 71 | HSIA078 | 1222343 | 81 | 1034-405 | 245 | His-9 to Ser-19, | AR089: 1, AR061: 0 | | |
| | | | | | | Arg-98 to Tyr-106, | S0354: 3, S0358: 3, | | |
| | | | | | | Ser-130 to Phe-138, | H0587: 3, L0764: 3, | | |
| | | | | | | Asn-157 to Ser-169, | L0803: 3, L0758: 3, | | |
| | | | | | | Thr-190 to Cys-196, | H0036: 2, L0794: 2, | | |
| | | | | | | Pro-205 to Ser-210. | L0809: 2, S0374: 2, | | |
| | | | | | | | S0376: 1, S0444: 1, | | |
| | | | | | | | S0408: 1, H0231: 1, | | |
| | | | | | | | L0783: 1, L0777: 1 | | |
| | | | | | | | and L0759: 1. | | |
| | | 889498 | 156 | 2-622 | 320 | Asp-24 to Phe-34, | | | |
| | | | | | | Asp-50 to Tyr-56, | | | |
| | | | | | | Pro-83 to Asp-90, | | | |
| | | | | | | Pro-103 to Lys-126, | | | |
| | | | | | | Leu-136 to Ser-143, | | | |
| | | | | | | Thr-171 to Asp-180. | | | |
| 72 | HWBEG18 | 909798 | 82 | 55-696 | 246 | Trp-46 to Lys-51, | AR089: 82, AR061: 18 | | |
| | | | | | | Pro-109 to Asn-123, | H0580: 1 | | |
| | | | | | | Phe-156 to Gly-165. | | | |
| 73 | HFCBB56 | 1204322 | 83 | 101-742 | 247 | Thr-37 to Ser-42. | AR061: 1, AR089: 1 | | |
| | | | | | | | H0009: 1 | | |
| | | 910073 | 157 | 209-565 | 321 | | | | |
| 74 | HEMCL65 | 910900 | 84 | 3-368 | 248 | Val-7 to Arg-13. | AR054: 8, AR051: 3, | | |
| | | | | | | | AR061: 2, AR089: 1, | | |
| | | | | | | | AR050: 0 | | |
| | | | | | | | S0046: 5, L0747: 4, | | |
| | | | | | | | H0575: 3, H0266: 3, | | |
| | | | | | | | L0741: 3, L0748: 3, | | |
| | | | | | | | L0750: 3, S0045: 2, | | |
| | | | | | | | H0150: 2, H0012: 2, | | |
| | | | | | | | H0039: 2, H0622: 2, | | |
| | | | | | | | L0751: 2, L0749: 2, | | |
| | | | | | | | L0780: 2, H0445: 2, | | |
| | | | | | | | L0605: 2, L0599: 2, | | |
| | | | | | | | H0171: 1, T0049: 1, | | |
| | | | | | | | H0261: 1, H0587: 1, | | |
| | | | | | | | L0021: 1, H0599: 1, | | |
| | | | | | | | H0253: 1, T0048: 1, | | |
| | | | | | | | H0024: 1, S0051: 1, | | |
| | | | | | | | L0483: 1, H0644: 1, | | |
| | | | | | | | H0268: 1, T0004: 1, | | |
| | | | | | | | H0647: 1, L0771: 1, | | |
| | | | | | | | L0662: 1, L0775: 1, | | |
| | | | | | | | L0512: 1, L0659: 1, | | |
| | | | | | | | L0790: 1, S3012: 1, | | |
| | | | | | | | S0028: 1, L0743: 1, | | |
| | | | | | | | H0444: 1, L0588: 1, | | |
| | | | | | | | L0603: 1 | | |
| | | | | | | | and H0506: 1. | | |
| 75 | HMAMB94 | 1225343 | 85 | 3-2132 | 249 | Trp-1 to Gly-6, | AR061: 1, AR089: 1 | | |
| | | | | | | Gln-20 to Asn-26, | H0266: 2, H0644: 2, | | |
| | | | | | | Pro-30 to Glu-35, | H0341: 1, S0278: 1, | | |
| | | | | | | Asn-43 to Tyr-50, | H0051: 1, L0602: 1 | | |
| | | | | | | Ser-57 to Pro-65, | and L0601: 1. | | |
| | | | | | | Ser-74 to Thr-82, | | | |
| | | | | | | Lys-98 to Gly-107, | | | |
| | | | | | | Asp-119 to Asn-125, | | | |
| | | | | | | Gly-159 to Glu-166, | | | |
| | | | | | | Thr-217 to Val-222, | | | |
| | | | | | | Asn-253 to Asp-262, | | | |
| | | | | | | Glu-294 to Ser-299, | | | |
| | | | | | | Gly-311 to Ser-316. | | | |
| | | 910909 | 158 | 3-587 | 322 | Trp-1 to Gly-6, | | | |
| | | | | | | Gln-20 to Asn-26, | | | |
| | | | | | | Pro-30 to Glu-35, | | | |
| | | | | | | Asn-43 to Tyr-50, | | | |
| | | | | | | Ser-57 to Pro-65, | | | |
| | | | | | | Ser-74 to Thr-82, | | | |
| | | | | | | Lys-98 to Gly-107, | | | |
| | | | | | | Asp-119 to Asn-125, | | | |
| | | | | | | Gly-159 to Glu-166. | | | |
| 76 | HCQCI06 | 915000 | 86 | 3-764 | 250 | Arg-16 to Ile-28, | AR061: 4, AR089: 2 | | |
| | | | | | | Glu-39 to Ser-46, | L0747: 6, L0777: 5, | | |
| | | | | | | Lys-52 to Leu-57, | L0794: 4, S0126: 4, | | |
| | | | | | | Glu-71 to Val-77, | S0242: 3, H0624: 2, | | |
| | | | | | | Thr-90 to Lys-114, | H0171: 2, H0014: 2, | | |
| | | | | | | Asn-141 to His-152, | L0803: 2, L0809: 2, | | |
| | | | | | | Leu-160 to Asp-171, | S0374: 2, L0779: 2, | | |
| | | | | | | Lys-249 to Asn-254. | L0759: 2, H0170: 1, | | |
| | | | | | | | S0040: 1, S0342: 1, | | |
| | | | | | | | H0344: 1, T0049: 1, | | |
| | | | | | | | S0356: 1, S0358: 1, | | |
| | | | | | | | H0486: 1, H0013: 1, | | |
| | | | | | | | L0022: 1, T0082: 1, | | |
| | | | | | | | L0105: 1, H0596: 1, | | |
| | | | | | | | H0266: 1, H0687: 1, | | |
| | | | | | | | S0250: 1, H0553: 1, | | |
| | | | | | | | L0763: 1, L0770: 1, | | |
| | | | | | | | L0662: 1, L0804: 1, | | |
| | | | | | | | L0655: 1, L0783: 1, | | |
| | | | | | | | L0787: 1, L0663: 1, | | |
| | | | | | | | L0565: 1, S0432: 1, | | |
| | | | | | | | L0744: 1, L0758: 1, | | |
| | | | | | | | L0601: 1, S0196: 1 | | |
| | | | | | | | and H0506: 1. | | |
| 77 | HWLFG75 | 1227642 | 87 | 1-1155 | 251 | | AR089: 1, AR061: 0 | | |
| | | | | | | | L0439: 7, L0770: 4, | | |
| | | | | | | | L0771: 4, L0779: 4, | | |
| | | | | | | | H0688: 3, H0617: 2, | | |
| | | | | | | | L0533: 2, L0803: 2, | | |
| | | | | | | | L0807: 2, L0791: 2, | | |
| | | | | | | | L0666: 2, H0539: 2, | | |
| | | | | | | | H0624: 1, S0400: 1, | | |
| | | | | | | | H0125: 1, H0192: 1, | | |
| | | | | | | | S0356: 1, S0354: 1, | | |
| | | | | | | | S0376: 1, S0360: 1, | | |
| | | | | | | | S0278: 1, H0550: 1, | | |
| | | | | | | | H0333: 1, S0049: 1, | | |
| | | | | | | | H0205: 1, S0051: 1, | | |
| | | | | | | | L0142: 1, L0455: 1, | | |
| | | | | | | | L0769: 1, L0794: 1, | | |
| | | | | | | | L0658: 1, L0540: 1, | | |
| | | | | | | | L0518: 1, L0809: 1, | | |
| | | | | | | | L0663: 1, H0689: 1, | | |
| | | | | | | | S0332: 1, H0214: 1, | | |
| | | | | | | | S3014: 1, L0747: 1, | | |
| | | | | | | | L0749: 1, L0758: 1, | | |
| | | | | | | | S0260: 1 | | |
| | | | | | | | and S0458: 1. | | |
| | | 916563 | 159 | 1-750 | 323 | Val-10 to Gly-21, | | | |
| | | | | | | Pro-38 to Ala-59, | | | |
| | | | | | | Arg-70 to Gly-77, | | | |
| | | | | | | Thr-110 to Thr-115, | | | |
| | | | | | | Leu-210 to Gly-217, | | | |
| | | | | | | Ser-225 to Trp-230, | | | |
| | | | | | | Pro-232 to Arg-239. | | | |
| 78 | HBODA38 | 923456 | 88 | 352-1470 | 252 | Pro-12 to Thr-23, | AR089: 39, AR061: 15 | | |
| | | | | | | Glu-49 to Val-56, | S0364: 10, H0373: 7, | | |
| | | | | | | Leu-77 to Tyr-83, | L0604: 7, H0196: 4, | | |
| | | | | | | Ala-125 to Glu-138, | L0485: 3, L0002: 1, | | |
| | | | | | | Tyr-144 to Gly-154, | H0411: 1, H0599: 1, | | |
| | | | | | | Gly-227 to Thr-233, | H0327: 1, L0471: 1, | | |
| | | | | | | His-286 to Arg-292, | L0163: 1, S0366: 1, | | |
| | | | | | | Pro-366 to Lys-373. | L0747: 1 | | |
| | | | | | | | and L0750: 1. | | |
| 79 | HCYBK19 | 1225324 | 89 | 2776-1331 | 253 | | AR089: 1, AR061: 0 | | |
| | | | | | | | L0794: 18, L0770: 10, | | |
| | | | | | | | L0779: 9, L0438: 8, | | |
| | | | | | | | L0754: 7, H0052: 6, | | |
| | | | | | | | H0553: 6, L0803: 6, | | |
| | | | | | | | L0747: 6, S0222: 4, | | |
| | | | | | | | H0013: 4, S0010: 4, | | |
| | | | | | | | L0769: 4, L0659: 4, | | |
| | | | | | | | L0809: 4, L0439: 4, | | |
| | | | | | | | L0752: 4, L0758: 4, | | |
| | | | | | | | S6016: 3, H0244: 3, | | |
| | | | | | | | H0144: 3, S0126: 3, | | |
| | | | | | | | L0599: 3, S0046: 2, | | |
| | | | | | | | L0157: 2, H0032: 2, | | |
| | | | | | | | H0169: 2, S0036: 2, | | |
| | | | | | | | H0038: 2, H0616: 2, | | |
| | | | | | | | L0763: 2, L0761: 2, | | |
| | | | | | | | L0766: 2, L0804: 2, | | |
| | | | | | | | L0650: 2, L0775: 2, | | |
| | | | | | | | L0805: 2, L0792: 2, | | |
| | | | | | | | L0665: 2, H0520: 2, | | |
| | | | | | | | H0436: 2, L0731: 2, | | |
| | | | | | | | L0596: 2, L0592: 2, | | |
| | | | | | | | L0581: 2, L0366: 2, | | |
| | | | | | | | H0423: 2, L0393: 1, | | |
| | | | | | | | H0656: 1, L0808: 1, | | |
| | | | | | | | S0282: 1, H0662: 1, | | |
| | | | | | | | S0376: 1, S0132: 1, | | |
| | | | | | | | H0393: 1, H0411: 1, | | |
| | | | | | | | H0369: 1, H0550: 1, | | |
| | | | | | | | H0441: 1, H0333: 1, | | |
| | | | | | | | T0114: 1, H0156: 1, | | |
| | | | | | | | L0021: 1, H0085: 1, | | |
| | | | | | | | H0050: 1, H0014: 1, | | |
| | | | | | | | H0020: 1, H0051: 1, | | |
| | | | | | | | S6028: 1, H0644: 1, | | |
| | | | | | | | S0364: 1, H0124: 1, | | |
| | | | | | | | H0068: 1, H0135: 1, | | |
| | | | | | | | H0591: 1, L0564: 1, | | |
| | | | | | | | H0342: 1, H0633: 1, | | |
| | | | | | | | L0640: 1, L0638: 1, | | |
| | | | | | | | L0764: 1, L0648: 1, | | |
| | | | | | | | L0662: 1, L0768: 1, | | |
| | | | | | | | L0649: 1, L0774: 1, | | |
| | | | | | | | L0636: 1, L0789: 1, | | |
| | | | | | | | L0666: 1, L0663: 1, | | |
| | | | | | | | L0352: 1, H0547: 1, | | |
| | | | | | | | H0689: 1, H0690: 1, | | |
| | | | | | | | H0539: 1, H0555: 1, | | |
| | | | | | | | S0028: 1, L0742: 1, | | |
| | | | | | | | L0748: 1, L0745: 1, | | |
| | | | | | | | L0750: 1, L0756: 1, | | |
| | | | | | | | L0777: 1, L0780: 1, | | |
| | | | | | | | L0757: 1, L0759: 1, | | |
| | | | | | | | S0308: 1, L0588: 1, | | |
| | | | | | | | S0106: 1, S0026: 1, | | |
| | | | | | | | H0667: 1, S0276: 1, | | |
| | | | | | | | H0543: 1 | | |
| | | | | | | | and H0677: 1. | | |
| | | 925494 | 160 | 2-1348 | 324 | Glu-4 to Gly-19, | | | |
| | | | | | | Ser-32 to Ser-39, | | | |
| | | | | | | Asp-106 to Asp-114, | | | |
| | | | | | | Met-145 to Arg-152, | | | |
| | | | | | | Asn-161 to Pro-177, | | | |
| | | | | | | Ala-210 to Gly-216, | | | |
| | | | | | | Tyr-260 to Tyr-270, | | | |
| | | | | | | Ser-282 to His-290, | | | |
| | | | | | | Thr-307 to Tyr-323, | | | |
| | | | | | | Cys-369 to Lys-382, | | | |
| | | | | | | Asn-433 to Lys-441. | | | |
| 80 | HWNCY05 | 1223031 | 90 | 1193-162 | 254 | Lys-11 to Gly-19, | AR061: 2, AR089: 1 | | |
| | | | | | | Glu-32 to His-43, | H0656: 2, S0360: 2, | | |
| | | | | | | Lys-60 to Glu-66, | H0657: 1, H0662: 1, | | |
| | | | | | | Pro-86 to Lys-98, | S0420: 1, S0356: 1, | | |
| | | | | | | Lys-118 to Leu-128, | S0358: 1, S0132: 1, | | |
| | | | | | | Thr-142 to Trp-148, | H0392: 1, S0022: 1, | | |
| | | | | | | Tyr-169 to Glu-177, | H0144: 1, H0520: 1, | | |
| | | | | | | Gln-200 to Asn-212, | H0659: 1, H0658: 1, | | |
| | | | | | | Glu-216 to Arg-222, | H0660: 1, H0672: 1, | | |
| | | | | | | Ala-255 to Glu-260, | S0380: 1, L0602: 1, | | |
| | | | | | | Glu-296 to Ala-307, | H0653: 1 | | |
| | | | | | | Asp-316 to Arg-324. | and H0677: 1. | | |
| | | 928789 | 161 | 3-1319 | 325 | Lys-11 to Gly-19, | | | |
| | | | | | | Glu-32 to His-43, | | | |
| | | | | | | Lys-60 to Glu-66, | | | |
| | | | | | | Pro-86 to Lys-98, | | | |
| | | | | | | Lys-118 to Leu-128, | | | |
| | | | | | | Thr-142 to Trp-148. | | | |
| 81 | HTXNN68 | 1143300 | 91 | 507-1169 | 255 | Pro-37 to Trp-42, | AR061: 5, AR089: 2 | | |
| | | | | | | Leu-85 to Lys-92, | H0556: 2, L0770: 2, | | |
| | | | | | | Lys-104 to Met-110, | H0395: 1, S0040: 1, | | |
| | | | | | | Asp-127 to Val-132, | H0657: 1, H0194: 1, | | |
| | | | | | | Glu-166 to His-182, | H0024: 1, L0667: 1, | | |
| | | | | | | Ser-189 to Asn-194, | L0766: 1, H0521: 1, | | |
| | | | | | | Val-196 to Tyr-202. | L0740: 1, L0779: 1 | | |
| | | | | | | | and L0588: 1. | | |
| | | 933670 | 162 | 1-960 | 326 | Glu-9 to Gly-14, | | | |
| | | | | | | Pro-28 to Cys-35. | | | |
| | | | | | | 5. | | | |
| 82 | HWWFW06 | 933671 | 92 | 3-533 | 256 | | AR089: 13, AR061: 6 | | |
| | | | | | | | H0556: 2, L0770: 2, | | |
| | | | | | | | H0395: 1, S0040: 1, | | |
| | | | | | | | H0657: 1, H0194: 1, | | |
| | | | | | | | H0024: 1, L0667: 1, | | |
| | | | | | | | L0766: 1, H0521: 1, | | |
| | | | | | | | L0740: 1, L0779: 1 | | |
| | | | | | | | and L0588: 1. | | |
| 83 | HOSDR06 | 1229558 | 93 | 1622-174 | 257 | | AR061: 7, AR089: 5 | | |
| | | | | | | | H0345: 10, L0766: 4, | | |
| | | | | | | | H0032: 3, L0803: 3, | | |
| | | | | | | | H0556: 2, T0002: 2, | | |
| | | | | | | | H0014: 2, H0031: 2, | | |
| | | | | | | | L0666: 2, H0521: 2, | | |
| | | | | | | | L0731: 2, H0624: 1, | | |
| | | | | | | | H0171: 1, H0642: 1, | | |
| | | | | | | | H0331: 1, T0114: 1, | | |
| | | | | | | | S0314: 1, S0003: 1, | | |
| | | | | | | | H0615: 1, H0688: 1, | | |
| | | | | | | | T0006: 1, H0090: 1, | | |
| | | | | | | | H0038: 1, H0040: 1, | | |
| | | | | | | | H0529: 1, L0638: 1, | | |
| | | | | | | | L0805: 1, L0655: 1, | | |
| | | | | | | | H0144: 1, S0374: 1, | | |
| | | | | | | | S0330: 1, S0044: 1, | | |
| | | | | | | | L0750: 1, L0756: 1, | | |
| | | | | | | | L0779: 1, L0755: 1, | | |
| | | | | | | | L0759: 1 | | |
| | | | | | | | and L0480: 1. | | |
| | | 937599 | 163 | 1-1260 | 327 | Trp-24 to Asn-36, | | | |
| | | | | | | Tyr-41 to Asp-46, | | | |
| | | | | | | Gln-103 to Pro-110, | | | |
| | | | | | | Phe-217 to Phe-222, | | | |
| | | | | | | Lys-227 to Asp-241, | | | |
| | | | | | | Asn-244 to Glu-251, | | | |
| | | | | | | Ala-258 to Ser-265, | | | |
| | | | | | | Ser-297 to His-305, | | | |
| | | | | | | Arg-345 to Tyr-350, | | | |
| | | | | | | Gly-358 to Gly-363, | | | |
| | | | | | | Pro-374 to His-380, | | | |
| | | | | | | Lys-400 to Glu-410. | | | |
| 84 | HNFHW14 | 939763 | 94 | 2-448 | 258 | Leu-9 to Met-15, | AR061: 32, AR089: 21 | | |
| | | | | | | Thr-25 to Cys-37, | H0271: 2 | | |
| | | | | | | Glu-40 to Gly-45, | | | |
| | | | | | | Leu-109 to His-115. | | | |
| 85 | HSDHB12 | 941973 | 95 | 3-638 | 259 | Met-49 to Tyr-56, | AR061: 8, AR089: 3 | | |
| | | | | | | Gln-91 to Val-101, | L0803: 4, L0794: 3, | | |
| | | | | | | Pro-172 to Gln-181, | L0747: 3, H0599: 2, | | |
| | | | | | | Ser-183 to Ile-197. | L0659: 2, L0789: 2, | | |
| | | | | | | | S0364: 1, L0804: 1, | | |
| | | | | | | | H0539: 1, L0720: 1 | | |
| | | | | | | | and S0031: 1. | | |
| | | 969094 | 164 | 3-278 | 328 | | | | |
| | | 969097 | 165 | 700-182 | 329 | Met-1 to Tyr-8, | | | |
| | | | | | | Gln-43 to Val-53, | | | |
| | | | | | | Pro-124 to Gln-133, | | | |
| | | | | | | Ser-135 to Ile-149. | | | |
| 86 | HTTJW49 | 948107 | 96 | 25-660 | 260 | Val-11 to Gly-21, | AR061: 3, AR089: 2 | 7q21.3-q22.1 | 120160, |
| | | | | | | Gly-72 to Thr-80. | L0769: 3, L0803: 3, | | 120160, |
| | | | | | | | L0748: 3, L0749: 3, | | 120160, |
| | | | | | | | H0574: 2, H0046: 2, | | 120160, |
| | | | | | | | L0794: 2, L0776: 2, | | 126650, |
| | | | | | | | L0439: 2, L0754: 2, | | 126650, |
| | | | | | | | L0747: 2, L0755: 2, | | 129900, |
| | | | | | | | L0605: 2, L0593: 2, | | 154276, |
| | | | | | | | H0686: 1, S0360: 1, | | 173360, |
| | | | | | | | L0717: 1, H0069: 1, | | 173360, |
| | | | | | | | H0575: 1, H0620: 1, | | 183600, |
| | | | | | | | H0024: 1, S0388: 1, | | 602136, |
| | | | | | | | H0510: 1, H0266: 1, | | 602136, |
| | | | | | | | H0644: 1, H0163: 1, | | 602136, |
| | | | | | | | H0090: 1, H0634: 1, | | 602447 |
| | | | | | | | H0561: 1, H0695: 1, | | |
| | | | | | | | L0763: 1, L0804: 1, | | |
| | | | | | | | L0774: 1, L0775: 1, | | |
| | | | | | | | L0659: 1, L0783: 1, | | |
| | | | | | | | L0809: 1, L0666: 1, | | |
| | | | | | | | L0665: 1, L0438: 1, | | |
| | | | | | | | H0519: 1, H0658: 1, | | |
| | | | | | | | H0539: 1, S0152: 1, | | |
| | | | | | | | H0522: 1, L0740: 1, | | |
| | | | | | | | L0777: 1, L0603: 1, | | |
| | | | | | | | S0276: 1 | | |
| | | | | | | | and H0542: 1. | | |
| 87 | HELDR74 | 1218982 | 97 | 2-1231 | 261 | His-17 to Gln-22, | AR089: 1, AR061: 0 | | |
| | | | | | | Gly-42 to Ala-50, | H0305: 4, L0731: 3, | | |
| | | | | | | Pro-61 to Thr-68, | L0581: 3, H0622: 2, | | |
| | | | | | | Tyr-171 to Lys-179, | H0059: 2, L0764: 2, | | |
| | | | | | | Gln-188 to Tyr-195, | L0766: 2, L0741: 2, | | |
| | | | | | | Glu-262 to Pro-268, | L0740: 2, L0749: 2, | | |
| | | | | | | Arg-314 to Asp-329, | H0423: 2, H0149: 1, | | |
| | | | | | | Glu-347 to Gly-354, | H0159: 1, S0114: 1, | | |
| | | | | | | Ser-367 to Thr-372, | H0656: 1, H0255: 1, | | |
| | | | | | | Gly-391 to Thr-399. | H0306: 1, H0402: 1, | | |
| | | | | | | | S0045: 1, H0351: 1, | | |
| | | | | | | | H0550: 1, H0441: 1, | | |
| | | | | | | | H0036: 1, T0048: 1, | | |
| | | | | | | | H0318: 1, H0581: 1, | | |
| | | | | | | | H0024: 1, H0051: 1, | | |
| | | | | | | | H0083: 1, H0510: 1, | | |
| | | | | | | | H0617: 1, H0412: 1, | | |
| | | | | | | | H0280: 1, H0647: 1, | | |
| | | | | | | | L0646: 1, L0374: 1, | | |
| | | | | | | | L0385: 1, L0662: 1, | | |
| | | | | | | | L0767: 1, L0794: 1, | | |
| | | | | | | | L0649: 1, L0774: 1, | | |
| | | | | | | | L0806: 1, L0653: 1, | | |
| | | | | | | | L0657: 1, L0659: 1, | | |
| | | | | | | | L0783: 1, S0126: 1, | | |
| | | | | | | | H0690: 1, H0670: 1, | | |
| | | | | | | | H0672: 1, S0328: 1, | | |
| | | | | | | | S0380: 1, H0555: 1, | | |
| | | | | | | | L0748: 1, L0752: 1, | | |
| | | | | | | | L0758: 1, S0194: 1, | | |
| | | | | | | | H0542: 1 | | |
| | | | | | | | and H0422: 1. | | |
| | | 963001 | 166 | 3-1223 | 330 | His-14 to Gln-19. | | | |
| 88 | HOEET48 | 963290 | 98 | 2-1030 | 262 | Ala-8 to Gly-14, | AR061: 9, AR089: 5 | | |
| | | | | | | Gly-32 to Arg-48, | S0356: 17, S0212: 6, | | |
| | | | | | | Ala-58 to Asn-66, | L0747: 6, S0360: 5, | | |
| | | | | | | Glu-82 to Gln-92, | H0486: 5, S0418: 3, | | |
| | | | | | | Arg-101 to Gly-110, | H0551: 3, S0040: 2, | | |
| | | | | | | Thr-124 to Asp-131, | S0354: 2, H0599: 2, | | |
| | | | | | | Trp-137 to Gly-146, | H0544: 2, H0617: 2, | | |
| | | | | | | Leu-153 to His-160, | H0413: 2, S0210: 2, | | |
| | | | | | | Glu-171 to Lys-177, | L0794: 2, S0126: 2, | | |
| | | | | | | Asp-191 to Ser-196, | S0037: 2, S0027: 2, | | |
| | | | | | | Glu-225 to Gly-233, | L0743: 2, H0665: 2, | | |
| | | | | | | Glu-248 to Glu-253, | S0192: 2, S0196: 2, | | |
| | | | | | | Thr-259 to Trp-265, | S0116: 1, H0662: 1, | | |
| | | | | | | Arg-268 to Asp-277, | S0420: 1, H0619: 1, | | |
| | | | | | | Glu-303 to Arg-311, | H0550: 1, H0013: 1, | | |
| | | | | | | Ala-329 to Leu-343. | H0618: 1, H0253: 1, | | |
| | | | | | | | H0251: 1, H0546: 1, | | |
| | | | | | | | H0545: 1, H0086: 1, | | |
| | | | | | | | H0123: 1, H0024: 1, | | |
| | | | | | | | H0286: 1, H0252: 1, | | |
| | | | | | | | H0628: 1, S0294: 1, | | |
| | | | | | | | L0372: 1, L0646: 1, | | |
| | | | | | | | L0773: 1, L0806: 1, | | |
| | | | | | | | L0654: 1, L0790: 1, | | |
| | | | | | | | L0565: 1, H0689: 1, | | |
| | | | | | | | H0670: 1, H0660: 1, | | |
| | | | | | | | S0028: 1, S0032: 1, | | |
| | | | | | | | L0751: 1, L0754: 1, | | |
| | | | | | | | L0749: 1, L0777: 1, | | |
| | | | | | | | L0780: 1, L0595: 1, | | |
| | | | | | | | H0668: 1, H0667: 1, | | |
| | | | | | | | S0276: 1, S0424: 1 | | |
| | | | | | | | and H0352: 1. | | |
| 89 | HBODE51 | 1188998 | 99 | 1-1116 | 263 | Gln-12 to His-20, | AR089: 4, AR061: 1 | | |
| | | | | | | Val-34 to Tyr-39, | L0751: 4, H0052: 3, | | |
| | | | | | | Asn-54 to Asn-59, | S0024: 3, S0364: 3, | | |
| | | | | | | Asp-105 to Gly-110, | L0438: 3, L0439: 3, | | |
| | | | | | | Gly-247 to Lys-256, | H0657: 2, L0415: 2, | | |
| | | | | | | Gln-314 to Gly-320, | H0438: 2, H0156: 2, | | |
| | | | | | | Arg-359 to Ser-366. | H0373: 2, L0455: 2, | | |
| | | | | | | | H0529: 2, L0664: 2, | | |
| | | | | | | | H0144: 2, L0749: 2, | | |
| | | | | | | | L0592: 2, H0422: 2, | | |
| | | | | | | | L0002: 1, H0583: 1, | | |
| | | | | | | | H0656: 1, S0045: 1, | | |
| | | | | | | | S0046: 1, L0717: 1, | | |
| | | | | | | | H0261: 1, H0455: 1, | | |
| | | | | | | | H0013: 1, H0575: 1, | | |
| | | | | | | | T0082: 1, S0665: 1, | | |
| | | | | | | | S0346: 1, H0581: 1, | | |
| | | | | | | | H0251: 1, H0046: 1, | | |
| | | | | | | | H0009: 1, H0050: 1, | | |
| | | | | | | | H0014: 1, T0010: 1, | | |
| | | | | | | | S0003: 1, S0214: 1, | | |
| | | | | | | | S0366: 1, H0316: 1, | | |
| | | | | | | | H0598: 1, L0351: 1, | | |
| | | | | | | | S0150: 1, L0643: 1, | | |
| | | | | | | | L0764: 1, L0662: 1, | | |
| | | | | | | | L0794: 1, L0805: 1, | | |
| | | | | | | | L0653: 1, L0659: 1, | | |
| | | | | | | | L0666: 1, L0665: 1, | | |
| | | | | | | | H0539: 1, H0521: 1, | | |
| | | | | | | | S0146: 1, H0436: 1, | | |
| | | | | | | | H0478: 1, H0345: 1, | | |
| | | | | | | | L0745: 1, L0758: 1, | | |
| | | | | | | | L0588: 1, L0366: 1, | | |
| | | | | | | | S0026: 1, H0667: 1, | | |
| | | | | | | | S0194: 1, H0542: 1, | | |
| | | | | | | | H0677: 1 | | |
| | | | | | | | and S0446: 1. | | |
| | | 964235 | 167 | 2-2053 | 331 | Gln-12 to His-20, | | | |
| | | | | | | Val-34 to Tyr-39, | | | |
| | | | | | | Asn-54 to Asn-59, | | | |
| | | | | | | Asp-105 to Gly-110, | | | |
| | | | | | | Gly-247 to Lys-256, | | | |
| | | | | | | Gln-314 to Gly-320, | | | |
| | | | | | | Arg-359 to Ser-366, | | | |
| | | | | | | Arg-420 to Gly-428, | | | |
| | | | | | | Ala-558 to Tyr-563, | | | |
| | | | | | | Leu-574 to Pro-579, | | | |
| | | | | | | Arg-592 to Phe-597, | | | |
| | | | | | | Ala-621 to Arg-630, | | | |
| | | | | | | Pro-636 to His-641. | | | |
| 90 | HE8UT58 | 973153 | 100 | 3-662 | 264 | | AR089: 8, AR061: 7 | | |
| | | | | | | | L0439: 4, L0751: 4, | | |
| | | | | | | | L0805: 3, H0674: 2, | | |
| | | | | | | | L0518: 2, L0809: 2, | | |
| | | | | | | | L0789: 2, L0731: 2, | | |
| | | | | | | | L0758: 2, H0661: 1, | | |
| | | | | | | | L0619: 1, S0358: 1, | | |
| | | | | | | | H0013: 1, H0156: 1, | | |
| | | | | | | | H0390: 1, H0544: 1, | | |
| | | | | | | | H0570: 1, S0051: 1, | | |
| | | | | | | | T0006: 1, H0032: 1, | | |
| | | | | | | | H0673: 1, S0036: 1, | | |
| | | | | | | | L0769: 1, L0800: 1, | | |
| | | | | | | | L0794: 1, L0803: 1, | | |
| | | | | | | | L0661: 1, L0636: 1, | | |
| | | | | | | | L0529: 1, L0543: 1, | | |
| | | | | | | | L0665: 1, H0521: 1, | | |
| | | | | | | | H0696: 1, H0694: 1, | | |
| | | | | | | | L0747: 1, L0779: 1, | | |
| | | | | | | | L0777: 1, L0752: 1 | | |
| | | | | | | | and H0352: 1. | | |
| 91 | HFXJI27 | 971046 | 101 | 173-367 | 265 | Pro-48 to Leu-53. | AR089: 10, AR061: 7 | | |
| | | | | | | | L0754: 21, H0553: 10, | | |
| | | | | | | | H0574: 6, L0771: 5, | | |
| | | | | | | | L0598: 4, L0659: 4, | | |
| | | | | | | | L0663: 4, L0745: 4, | | |
| | | | | | | | L0731: 4, L0599: 4, | | |
| | | | | | | | S0414: 3, H0328: 3, | | |
| | | | | | | | L0776: 3, L0439: 3, | | |
| | | | | | | | L0756: 3, H0624: 2, | | |
| | | | | | | | S0358: 2, S0376: 2, | | |
| | | | | | | | S0444: 2, L0717: 2, | | |
| | | | | | | | H0596: 2, H0687: 2, | | |
| | | | | | | | H0615: 2, L0646: 2, | | |
| | | | | | | | L0662: 2, L0803: 2, | | |
| | | | | | | | L0774: 2, L0438: 2, | | |
| | | | | | | | H0670: 2, S0330: 2, | | |
| | | | | | | | H0478: 2, L0779: 2, | | |
| | | | | | | | L0777: 2, L0755: 2, | | |
| | | | | | | | S0260: 2, S0452: 2, | | |
| | | | | | | | H0171: 1, S0402: 1, | | |
| | | | | | | | H0583: 1, H0650: 1, | | |
| | | | | | | | H0341: 1, S0282: 1, | | |
| | | | | | | | H0638: 1, S0360: 1, | | |
| | | | | | | | S0132: 1, H0497: 1, | | |
| | | | | | | | H0632: 1, H0156: 1, | | |
| | | | | | | | H0575: 1, L0105: 1, | | |
| | | | | | | | H0052: 1, H0251: 1, | | |
| | | | | | | | H0545: 1, L0471: 1, | | |
| | | | | | | | H0012: 1, H0051: 1, | | |
| | | | | | | | H0510: 1, S0003: 1, | | |
| | | | | | | | S0214: 1, H0622: 1, | | |
| | | | | | | | H0124: 1, H0090: 1, | | |
| | | | | | | | H0591: 1, H0038: 1, | | |
| | | | | | | | H0616: 1, H0551: 1, | | |
| | | | | | | | T0067: 1, H0413: 1, | | |
| | | | | | | | L0065: 1, S0422: 1, | | |
| | | | | | | | UNKWN: 1, L0649: 1, | | |
| | | | | | | | L0378: 1, L0655: 1, | | |
| | | | | | | | L0517: 1, L0783: 1, | | |
| | | | | | | | L0666: 1, L0664: 1, | | |
| | | | | | | | L0665: 1, H0144: 1, | | |
| | | | | | | | S0374: 1, H0520: 1, | | |
| | | | | | | | H0519: 1, S0126: 1, | | |
| | | | | | | | H0684: 1, H0658: 1, | | |
| | | | | | | | H0666: 1, H0521: 1, | | |
| | | | | | | | L0746: 1, L0750: 1, | | |
| | | | | | | | L0786: 1, L0591: 1, | | |
| | | | | | | | L0485: 1, L0593: 1, | | |
| | | | | | | | S0026: 1, S0192: 1, | | |
| | | | | | | | S0242: 1, H0677: 1 | | |
| | | | | | | | and H0506: 1. | | |
| | | 975381 | 168 | 3-599 | 332 | His-1 to Thr-8, | | | |
| | | | | | | Val-11 to Tyr-20, | | | |
| | | | | | | Lys-89 to Arg-105, | | | |
| | | | | | | Gln-124 to His-131, | | | |
| | | | | | | Gln-147 to Ser-170. | | | |
| 92 | HETHO38 | 1124598 | 102 | 43-1098 | 266 | Phe-63 to Trp-79, | S0046: 2, H0038: 2, | | |
| | | | | | | Lys-87 to Asp-102, | H0561: 2, L0783: 2, | | |
| | | | | | | Lys-111 to Gly-116, | L0809: 2, L0666: 2, | | |
| | | | | | | Glu-130 to Gln-138, | H0519: 2, L0740: 2, | | |
| | | | | | | Asn-151 to Glu-156, | L0362: 2, L0603: 2, | | |
| | | | | | | Pro-160 to Ala-165, | S0026: 2, L0718: 2, | | |
| | | | | | | Asp-179 to Thr-185. | T0049: 1, S0134: 1, | | |
| | | | | | | | S0212: 1, S0420: 1, | | |
| | | | | | | | S0360: 1, T0008: 1, | | |
| | | | | | | | S0278: 1, H0586: 1, | | |
| | | | | | | | H0250: 1, L0021: 1, | | |
| | | | | | | | H0581: 1, H0046: 1, | | |
| | | | | | | | H0188: 1, H0615: 1, | | |
| | | | | | | | H0628: 1, H0616: 1, | | |
| | | | | | | | S0144: 1, L0794: 1, | | |
| | | | | | | | L0375: 1, L0659: 1, | | |
| | | | | | | | L0665: 1, H0521: 1 | | |
| | | | | | | | and H0478: 1. | | |
| | | 552107 | 169 | 43-507 | 333 | Phe-63 to Trp-79, | | | |
| | | | | | | Lys-87 to Asp-102, | | | |
| | | | | | | Lys-111 to Gly-116. | | | |
| 93 | HTEIL07 | 953803 | 103 | 42-443 | 267 | Glu-13 to Thr-27. | AR061: 1, AR089: 0 | | |
| | | | | | | | L0758: 4, L0617: 2, | | |
| | | | | | | | L0794: 2, H0253: 1, | | |
| | | | | | | | H0038: 1, H0616: 1, | | |
| | | | | | | | L0789: 1 | | |
| | | | | | | | and L0779: 1. | | |
| 94 | HDPTC44 | 553453 | 104 | 1-480 | 268 | | H0521: 2, S0010: 1, | 1q25.3 | 145001, |
| | | | | | | | H0083: 1, H0510: 1, | | 150292, |
| | | | | | | | H0416: 1, S0214: 1, | | 208250, |
| | | | | | | | H0090: 1, S0126: 1 | | 600995, |
| | | | | | | | and S0146: 1. | | 601652 |
| 95 | HHPDE40 | 552112 | 105 | 42-596 | 269 | Met-10 to Arg-15. | H0484: 1, H0051: 1 | | |
| | | | | | | | and S0002: 1. | | |
| 96 | HCESP56 | 827671 | 106 | 147-512 | 270 | Asp-15 to Thr-21, | AR061: 8, AR089: 5 | 6p22.3p22.1 | 187680 |
| | | | | | | Gln-83 to Ile-91. | H0052: 3, S0282: 1, | | |
| | | | | | | | H0194: 1, H0009: 1, | | |
| | | | | | | | L0789: 1, L0602: 1 | | |
| | | | | | | | and L0439: 1. | | |
| 97 | HHFGZ38 | 1117192 | 107 | 1-1335 | 271 | | AR089: 8, AR061: 2 | | |
| | | | | | | | H0556: 1, S0040: 1, | | |
| | | | | | | | H0657: 1, H0306: 1, | | |
| | | | | | | | H0393: 1, H0050: 1, | | |
| | | | | | | | H0266: 1, H0112: 1, | | |
| | | | | | | | H0063: 1, S0142: 1, | | |
| | | | | | | | S0002: 1, L0794: 1, | | |
| | | | | | | | L0378: 1, L0655: 1, | | |
| | | | | | | | L0791: 1, L0665: 1, | | |
| | | | | | | | H0539: 1, H0521: 1, | | |
| | | | | | | | L0596: 1, L0593: 1, | | |
| | | | | | | | L0595: 1 | | |
| | | | | | | | and H0653: 1. | | |
| | | 785591 | 170 | 302-1165 | 334 | | | | |
| 98 | HAHEF22 | 910996 | 108 | 3-839 | 272 | Lys-51 to Gly-58, | AR089: 16, AR061: 8 | | |
| | | | | | | Asp-67 to Glu-73. | L0803: 4, L0794: 3, | | |
| | | | | | | | L0747: 3, H0599: 2, | | |
| | | | | | | | L0659: 2, L0789: 2, | | |
| | | | | | | | S0364: 1, L0804: 1, | | |
| | | | | | | | H0539: 1, L0720: 1 | | |
| | | | | | | | and S0031: 1. | | |
| 99 | HCUEV29 | 816065 | 109 | 2-298 | 273 | | AR089: 1, AR061: 1 | | |
| | | | | | | | H0457: 15, H0271: 11, | | |
| | | | | | | | H0494: 7, H0521: 7, | | |
| | | | | | | | H0141: 6, H0255: 6, | | |
| | | | | | | | S0434: 6, L0758: 5, | | |
| | | | | | | | S0354: 4, S0358: 4, | | |
| | | | | | | | S0278: 4, H0179: 4, | | |
| | | | | | | | L0771: 4, L0783: 4, | | |
| | | | | | | | H0436: 4, H0556: 3, | | |
| | | | | | | | H0069: 3, H0618: 3, | | |
| | | | | | | | L0776: 3, L0659: 3, | | |
| | | | | | | | H0435: 3, H0661: 2, | | |
| | | | | | | | S0418: 2, S0420: 2, | | |
| | | | | | | | H0580: 2, S0222: 2, | | |
| | | | | | | | H0486: 2, H0013: 2, | | |
| | | | | | | | H0581: 2, H0083: 2, | | |
| | | | | | | | H0266: 2, S0003: 2, | | |
| | | | | | | | H0424: 2, S0036: 2, | | |
| | | | | | | | H0090: 2, H0038: 2, | | |
| | | | | | | | H0634: 2, H0616: 2, | | |
| | | | | | | | S0344: 2, S0002: 2, | | |
| | | | | | | | L0770: 2, L0646: 2, | | |
| | | | | | | | L0662: 2, L0381: 2, | | |
| | | | | | | | L0655: 2, L0809: 2, | | |
| | | | | | | | L0666: 2, L0665: 2, | | |
| | | | | | | | S0216: 2, H0703: 2, | | |
| | | | | | | | H0547: 2, H0593: 2, | | |
| | | | | | | | H0670: 2, H0539: 2, | | |
| | | | | | | | S0027: 2, L0748: 2, | | |
| | | | | | | | L0439: 2, L0751: 2, | | |
| | | | | | | | L0591: 2, H0543: 2, | | |
| | | | | | | | H0624: 1, H0650: 1, | | |
| | | | | | | | H0656: 1, S0116: 1, | | |
| | | | | | | | H0484: 1, H0402: 1, | | |
| | | | | | | | S0376: 1, S0444: 1, | | |
| | | | | | | | S0360: 1, S0045: 1, | | |
| | | | | | | | S0046: 1, H0619: 1, | | |
| | | | | | | | S6026: 1, H0261: 1, | | |
| | | | | | | | H0438: 1, H0586: 1, | | |
| | | | | | | | H0559: 1, H0101: 1, | | |
| | | | | | | | H0427: 1, H0036: 1, | | |
| | | | | | | | T0048: 1, H0318: 1, | | |
| | | | | | | | S0474: 1, H0421: 1, | | |
| | | | | | | | H0052: 1, H0205: 1, | | |
| | | | | | | | H0231: 1, L0738: 1, | | |
| | | | | | | | H0180: 1, H0081: 1, | | |
| | | | | | | | T0010: 1, H0416: 1, | | |
| | | | | | | | T0006: 1, H0213: 1, | | |
| | | | | | | | H0598: 1, H0135: 1, | | |
| | | | | | | | H0040: 1, H0087: 1, | | |
| | | | | | | | H0264: 1, H0488: 1, | | |
| | | | | | | | H0623: 1, H0334: 1, | | |
| | | | | | | | H0561: 1, S0440: 1, | | |
| | | | | | | | L0369: 1, L0769: 1, | | |
| | | | | | | | L0667: 1, L0773: 1, | | |
| | | | | | | | L0648: 1, L0364: 1, | | |
| | | | | | | | L0766: 1, L0649: 1, | | |
| | | | | | | | L0375: 1, L0378: 1, | | |
| | | | | | | | L0806: 1, L0653: 1, | | |
| | | | | | | | L0657: 1, L0636: 1, | | |
| | | | | | | | S0052: 1, S0428: 1, | | |
| | | | | | | | H0702: 1, S0374: 1, | | |
| | | | | | | | L0438: 1, S0328: 1, | | |
| | | | | | | | S0330: 1, H0710: 1, | | |
| | | | | | | | S0146: 1, S0406: 1, | | |
| | | | | | | | H0576: 1, H0631: 1, | | |
| | | | | | | | S3014: 1, L0779: 1, | | |
| | | | | | | | L0759: 1, H0445: 1, | | |
| | | | | | | | S0436: 1, S0011: 1, | | |
| | | | | | | | S0026: 1, S0242: 1 | | |
| | | | | | | | and H0506: 1. | | |
| 100 | HBGQN46 | 945370 | 110 | 99-683 | 274 | Arg-25 to Ala-32, | AR089: 1, AR061: 0 | | |
| | | | | | | Ala-54 to Tyr-59. | H0617: 2, L0794: 2, | | |
| | | | | | | | L0766: 2, L0806: 2, | | |
| | | | | | | | L0777: 2, H0587: 1, | | |
| | | | | | | | L0767: 1, L0375: 1, | | |
| | | | | | | | L0790: 1, L0792: 1, | | |
| | | | | | | | L0743: 1, L0779: 1 | | |
| | | | | | | | and L0780: 1. | | |
| 101 | HMQCE42 | 806815 | 111 | 1-207 | 275 | Gly-1 to Pro-7, | H0250: 1 | 6p21.3 | 106300, |
| | | | | | | Pro-14 to Leu-20. | and H0059: 1. | | 108800, |
| | | | | | | | | | 120290, |
| | | | | | | | | | 120290, |
| | | | | | | | | | 120810, |
| | | | | | | | | | 120820, |
| | | | | | | | | | 142857, |
| | | | | | | | | | 142858, |
| | | | | | | | | | 150270, |
| | | | | | | | | | 167250, |
| | | | | | | | | | 170261, |
| | | | | | | | | | 177900, |
| | | | | | | | | | 179450, |
| | | | | | | | | | 201910, |
| | | | | | | | | | 217000, |
| | | | | | | | | | 222100, |
| | | | | | | | | | 233100, |
| | | | | | | | | | 235200, |
| | | | | | | | | | 248611, |
| | | | | | | | | | 256550, |
| | | | | | | | | | 256550, |
| | | | | | | | | | 600202, |
| | | | | | | | | | 600261, |
| | | | | | | | | | 601868, |
| | | | | | | | | | 602280, |
| | | | | | | | | | 602475 |
| 102 | HEQAY32 | 1207206 | 112 | 2611-2147 | 276 | Tyr-23 to Ser-30, | AR089: 2, AR061: 0 | | |
| | | | | | | Pro-47 to Gly-52, | L0438: 6, L0439: 5, | | |
| | | | | | | Ala-86 to Ser-91, | H0052: 3, L0743: 3, | | |
| | | | | | | Pro-114 to Arg-124, | L0731: 3, H0265: 2, | | |
| | | | | | | Thr-129 to Pro-135. | H0617: 2, H0634: 2, | | |
| | | | | | | | L0769: 2, L0766: 2, | | |
| | | | | | | | L0381: 2, L0751: 2, | | |
| | | | | | | | L0749: 2, L0758: 2, | | |
| | | | | | | | S0282: 1, S0356: 1, | | |
| | | | | | | | H0675: 1, S0132: 1, | | |
| | | | | | | | H0645: 1, S0222: 1, | | |
| | | | | | | | H0438: 1, T0082: 1, | | |
| | | | | | | | H0194: 1, H0544: 1, | | |
| | | | | | | | H0178: 1, H0355: 1, | | |
| | | | | | | | H0428: 1, H0181: 1, | | |
| | | | | | | | H0361: 1, H0038: 1, | | |
| | | | | | | | H0040: 1, H0616: 1, | | |
| | | | | | | | H0063: 1, H0087: 1, | | |
| | | | | | | | T0067: 1, H0059: 1, | | |
| | | | | | | | H0649: 1, S0002: 1, | | |
| | | | | | | | H0529: 1, L0535: 1, | | |
| | | | | | | | L0761: 1, L0646: 1, | | |
| | | | | | | | L0771: 1, L0767: 1, | | |
| | | | | | | | L0806: 1, L0653: 1, | | |
| | | | | | | | L0776: 1, L0659: 1, | | |
| | | | | | | | L0789: 1, L0663: 1, | | |
| | | | | | | | H0144: 1, L0565: 1, | | |
| | | | | | | | H0690: 1, H0682: 1, | | |
| | | | | | | | H0696: 1, H0436: 1, | | |
| | | | | | | | S0028: 1, L0741: 1, | | |
| | | | | | | | L0759: 1, H0667: 1, | | |
| | | | | | | | S0276: 1, H0542: 1 | | |
| | | | | | | | and H0423: 1. | | |
| | | 869178 | 171 | 604-924 | 335 | Pro-23 to Ala-30, | | | |
| | | | | | | Arg-63 to Pro-68, | | | |
| | | | | | | Gly-80 to Trp-85, | | | |
| | | | | | | Asn-92 to Gly-101. | | | |
| 103 | HOEFI09 | 974194 | 113 | 2-439 | 211 | Pro-13 to Gly-20, | H0521: 174, | 6p21.3 | 106300, |
| | | | | | | Ala-35 to Gln-44, | H0556: 138, | | 108800, |
| | | | | | | Thr-50 to Gln-57. | H0581: 90, S0278: | | 120290, |
| | | | | | | | 66, L0665: 66, H0542: | | 120290, |
| | | | | | | | 66, S0360: 64, H0543: | | 120810, |
| | | | | | | | 61, H0046: 57, S0344: | | 120820, |
| | | | | | | | 57, L0659: 55, S0358: | | 142857, |
| | | | | | | | 54, H0271: 50, S0142: | | 142858, |
| | | | | | | | 49, H0522: 49, S0144: | | 150270, |
| | | | | | | | 48, L0664: 46, H0265: | | 167250, |
| | | | | | | | 45, H0585: 45, H0657: | | 170261, |
| | | | | | | | 42, L0655: 41, H0445: | | 177900, |
| | | | | | | | 41, H0555: 37, L0666: | | 179450, |
| | | | | | | | 36, H0518: 35, H0486: | | 201910, |
| | | | | | | | 34, L0662: 34, S0132: | | 217000, |
| | | | | | | | 33, H0318: 33, H0622: | | 222100, |
| | | | | | | | 32, S0354: 31, H0090: | | 233100, |
| | | | | | | | 31, S0372: 31, H0575: | | 235200, |
| | | | | | | | 30, H0435: 29, H0641: | | 248611, |
| | | | | | | | 27, H0635: 26, S0126: | | 256550, |
| | | | | | | | 26, H0457: 25, H0634: | | 256550, |
| | | | | | | | 25, H0436: 25, H0423: | | 600202, |
| | | | | | | | 25, H0255: 24, H0250: | | 600261, |
| | | | | | | | 24, H0069: 22, H0591: | | 601868, |
| | | | | | | | 22, S0328: 22, H0509: | | 602280, |
| | | | | | | | 21, H0658: 21, L0601: | | 602475 |
| | | | | | | | 21, H0179: 20, S0002: | | |
| | | | | | | | 20, S0374: 20, H0648: | | |
| | | | | | | | 20, H0039: 19, L0378: | | |
| | | | | | | | 19, L0663: 19, H0422: | | |
| | | | | | | | 19, S0114: 18, S0116: | | |
| | | | | | | | 18, H0586: 18, S0428: | | |
| | | | | | | | 18, H0672: 18, H0583: | | |
| | | | | | | | 17, H0617: 17, L0748: | | |
| | | | | | | | 17, H0506: 17, L0596: | | |
| | | | | | | | 16, H0580: 15, H0031: | | |
| | | | | | | | 15, L0651: 15, H0619: | | |
| | | | | | | | 14, H0150: 14, L0657: | | |
| | | | | | | | 14, H0593: 14, L0754: | | |
| | | | | | | | 14, H0638: 13, H0063: | | |
| | | | | | | | 13, H0646: 13, L0599: | | |
| | | | | | | | 13, H0663: 12, S0376: | | |
| | | | | | | | 12, H0597: 12, H0644: | | |
| | | | | | | | 12, H0087: 12, L0648: | | |
| | | | | | | | 12, S0052: 12, H0576: | | |
| | | | | | | | 12, L0751: 12, S0026: | | |
| | | | | | | | 12, L0600: 12, T0002: | | |
| | | | | | | | 11, T0049: 11, S0212: | | |
| | | | | | | | 11, H0402: 11, S0356: | | |
| | | | | | | | 11, H0427: 11, H0040: | | |
| | | | | | | | 11, H0264: 11, H0561: | | |
| | | | | | | | 11, S0426: 11, L0653: | | |
| | | | | | | | 11, S0322: 11, S0134: | | |
| | | | | | | | 10, S0218: 10, H0650: | | |
| | | | | | | | 10, H0545: 10, H0510: | | |
| | | | | | | | 10, H0416: 10, S0022: | | |
| | | | | | | | 10, S0146: 10, S0027: | | |
| | | | | | | | 10, H0014: 9, | | |
| | | | | | | | H0188: 9, | | |
| | | | | | | | H0124: 9, L0646: 9, | | |
| | | | | | | | L0374: 9, H0660: 9, | | |
| | | | | | | | S0330: 9, S0044: 9, | | |
| | | | | | | | L0740: 9, H0656: 8, | | |
| | | | | | | | H0341: 8, H0587: 8, | | |
| | | | | | | | H0599: 8, H0036: 8, | | |
| | | | | | | | H0024: 8, S0003: 8, | | |
| | | | | | | | H0560: 8, H0647: 8, | | |
| | | | | | | | L0438: 8, H0670: 8, | | |
| | | | | | | | L0757: 8, S0040: 7, | | |
| | | | | | | | H0559: 7, H0004: 7, | | |
| | | | | | | | H0085: 7, L0483: 7, | | |
| | | | | | | | H0628: 7, L0762: 7, | | |
| | | | | | | | L0647: 7, S0380: 7, | | |
| | | | | | | | S3014: 7, S0011: 7, | | |
| | | | | | | | H0550: 6, H0574: 6, | | |
| | | | | | | | H0618: 6, H0421: 6, | | |
| | | | | | | | H0544: 6, H0050: 6, | | |
| | | | | | | | H0375: 6, T0006: 6, | | |
| | | | | | | | H0553: 6, H0488: 6, | | |
| | | | | | | | S0053: 6, H0682: 6, | | |
| | | | | | | | S0378: 6, H0187: 6, | | |
| | | | | | | | L0750: 6, L0581: 6, | | |
| | | | | | | | H0141: 5, L0785: 5, | | |
| | | | | | | | H0254: 5, H0661: 5, | | |
| | | | | | | | S0140: 5, S0222: 5, | | |
| | | | | | | | H0497: 5, H0632: 5, | | |
| | | | | | | | T0060: 5, H0251: 5, | | |
| | | | | | | | H0596: 5, H0213: 5, | | |
| | | | | | | | H0181: 5, H0598: 5, | | |
| | | | | | | | H0135: 5, H0551: 5, | | |
| | | | | | | | L0369: 5, L0372: 5, | | |
| | | | | | | | L0364: 5, L0375: 5, | | |
| | | | | | | | L0382: 5, S0216: 5, | | |
| | | | | | | | H0689: 5, L0602: 5, | | |
| | | | | | | | L0744: 5, L0439: 5, | | |
| | | | | | | | S0436: 5, H0653: 5, | | |
| | | | | | | | H0665: 5, H0394: 4, | | |
| | | | | | | | H0584: 4, S0046: 4, | | |
| | | | | | | | H0640: 4, H0431: 4, | | |
| | | | | | | | H0592: 4, H0204: 4, | | |
| | | | | | | | H0086: 4, S0051: 4, | | |
| | | | | | | | H0354: 4, H0038: 4, | | |
| | | | | | | | H0059: 4, H0652: 4, | | |
| | | | | | | | L0606: 4, L0783: 4, | | |
| | | | | | | | H0691: 4, H0690: 4, | | |
| | | | | | | | H0683: 4, L0747: 4, | | |
| | | | | | | | H0444: 4, L0603: 4, | | |
| | | | | | | | H0225: 3, H0161: 3, | | |
| | | | | | | | L0808: 3, S0282: 3, | | |
| | | | | | | | H0671: 3, H0459: 3, | | |
| | | | | | | | S0420: 3, H0489: 3, | | |
| | | | | | | | S0045: 3, H0370: 3, | | |
| | | | | | | | H0392: 3, H0590: 3, | | |
| | | | | | | | T0071: 3, H0546: 3, | | |
| | | | | | | | H0373: 3, H0630: 3, | | |
| | | | | | | | H0076: 3, H0284: 3, | | |
| | | | | | | | S0214: 3, H0688: 3, | | |
| | | | | | | | H0604: 3, H0424: 3, | | |
| | | | | | | | L0142: 3, H0032: 3, | | |
| | | | | | | | H0169: 3, H0674: 3, | | |
| | | | | | | | H0376: 3, H0316: 3, | | |
| | | | | | | | H0616: 3, H0477: 3, | | |
| | | | | | | | H0487: 3, H0494: 3, | | |
| | | | | | | | H0649: 3, H0529: 3, | | |
| | | | | | | | L0763: 3, L0769: 3, | | |
| | | | | | | | L0767: 3, L0775: 3, | | |
| | | | | | | | L0607: 3, L0656: 3, | | |
| | | | | | | | L0517: 3, L0542: 3, | | |
| | | | | | | | L0518: 3, L0782: 3, | | |
| | | | | | | | H0144: 3, H0684: 3, | | |
| | | | | | | | H0659: 3, H0666: 3, | | |
| | | | | | | | L0752: 3, S0434: 3, | | |
| | | | | | | | L0591: 3, L0592: 3, | | |
| | | | | | | | L0485: 3, L0362: 3, | | |
| | | | | | | | H0685: 2, H0664: 2, | | |
| | | | | | | | H0306: 2, H0125: 2, | | |
| | | | | | | | S0410: 2, S0300: 2, | | |
| | | | | | | | H0351: 2, H0549: 2, | | |
| | | | | | | | H0492: 2, L0586: 2, | | |
| | | | | | | | H0013: 2, H0191: 2, | | |
| | | | | | | | H0042: 2, H0274: 2, | | |
| | | | | | | | S0474: 2, H0309: 2, | | |
| | | | | | | | H0263: 2, H0235: 2, | | |
| | | | | | | | H0231: 2, H0123: 2, | | |
| | | | | | | | T0003: 2, H0015: 2, | | |
| | | | | | | | H0629: 2, H0060: 2, | | |
| | | | | | | | H0687: 2, H0286: 2, | | |
| | | | | | | | T0023: 2, H0030: 2, | | |
| | | | | | | | H0111: 2, H0182: 2, | | |
| | | | | | | | H0606: 2, H0388: 2, | | |
| | | | | | | | H0189: 2, S0036: 2, | | |
| | | | | | | | H0623: 2, H0102: 2, | | |
| | | | | | | | H0100: 2, L0475: 2, | | |
| | | | | | | | H0625: 2, S0294: 2, | | |
| | | | | | | | L0065: 2, S0438: 2, | | |
| | | | | | | | S0422: 2, L0637: 2, | | |
| | | | | | | | L0627: 2, L0642: 2, | | |
| | | | | | | | L0654: 2, L0527: 2, | | |
| | | | | | | | L0636: 2, L0540: 2, | | |
| | | | | | | | S0174: 2, H0134: 2, | | |
| | | | | | | | S0404: 2, S0406: 2, | | |
| | | | | | | | L0777: 2, L0755: 2, | | |
| | | | | | | | L0758: 2, L0759: 2, | | |
| | | | | | | | S0031: 2, S0308: 2, | | |
| | | | | | | | H0343: 2, L0588: 2, | | |
| | | | | | | | L0605: 2, L0595: 2, | | |
| | | | | | | | L0361: 2, H0668: 2, | | |
| | | | | | | | H0667: 2, S0456: 2, | | |
| | | | | | | | H0395: 1, H0224: 1, | | |
| | | | | | | | H0139: 1, H0159: 1, | | |
| | | | | | | | S0470: 1, S0342: 1, | | |
| | | | | | | | S0402: 1, H0662: 1, | | |
| | | | | | | | H0300: 1, S0442: 1, | | |
| | | | | | | | S0444: 1, H0675: 1, | | |
| | | | | | | | S0408: 1, H0208: 1, | | |
| | | | | | | | H0645: 1, H0393: 1, | | |
| | | | | | | | H0411: 1, H0437: 1, | | |
| | | | | | | | H0369: 1, H0608: 1, | | |
| | | | | | | | H0442: 1, H0409: 1, | | |
| | | | | | | | H0600: 1, H0333: 1, | | |
| | | | | | | | H0331: 1, H0257: 1, | | |
| | | | | | | | L0622: 1, L0623: 1, | | |
| | | | | | | | H0485: 1, N0009: 1, | | |
| | | | | | | | H0101: 1, S0280: 1, | | |
| | | | | | | | H0156: 1, L0021: 1, | | |
| | | | | | | | H0053: 1, H0349: 1, | | |
| | | | | | | | H0025: 1, H0253: 1, | | |
| | | | | | | | H0196: 1, H0194: 1, | | |
| | | | | | | | H0184: 1, L0040: 1, | | |
| | | | | | | | H0327: 1, H0439: 1, | | |
| | | | | | | | H0045: 1, H0041: 1, | | |
| | | | | | | | N0006: 1, H0081: 1, | | |
| | | | | | | | H0620: 1, L0163: 1, | | |
| | | | | | | | T0010: 1, H0083: 1, | | |
| | | | | | | | H0109: 1, H0247: 1, | | |
| | | | | | | | H0266: 1, S0316: 1, | | |
| | | | | | | | H0290: 1, H0292: 1, | | |
| | | | | | | | S0314: 1, S0250: 1, | | |
| | | | | | | | H0252: 1, H0615: 1, | | |
| | | | | | | | H0428: 1, L0194: 1, | | |
| | | | | | | | H0180: 1, L0055: 1, | | |
| | | | | | | | H0165: 1, S0364: 1, | | |
| | | | | | | | H0361: 1, S0366: 1, | | |
| | | | | | | | H0163: 1, H0372: 1, | | |
| | | | | | | | H0433: 1, T0069: 1, | | |
| | | | | | | | L0370: 1, T0041: 1, | | |
| | | | | | | | S0370: 1, S0382: 1, | | |
| | | | | | | | S0306: 1, S0466: 1, | | |
| | | | | | | | S0440: 1, H0538: 1, | | |
| | | | | | | | L0598: 1, L0520: 1, | | |
| | | | | | | | L0640: 1, L0371: 1, | | |
| | | | | | | | L0535: 1, L0631: 1, | | |
| | | | | | | | L0638: 1, L0761: 1, | | |
| | | | | | | | L0630: 1, L0772: 1, | | |
| | | | | | | | L0373: 1, L0641: 1, | | |
| | | | | | | | L0765: 1, L0771: 1, | | |
| | | | | | | | L0521: 1, L0768: 1, | | |
| | | | | | | | L0766: 1, L0386: 1, | | |
| | | | | | | | L0774: 1, L0806: 1, | | |
| | | | | | | | L0652: 1, L0776: 1, | | |
| | | | | | | | L0661: 1, L0628: 1, | | |
| | | | | | | | L0658: 1, L0547: 1, | | |
| | | | | | | | L0546: 1, L0383: 1, | | |
| | | | | | | | L0519: 1, L0545: 1, | | |
| | | | | | | | L0528: 1, T0068: 1, | | |
| | | | | | | | S0148: 1, H0519: 1, | | |
| | | | | | | | S0122: 1, H0579: 1, | | |
| | | | | | | | S0332: 1, S0350: 1, | | |
| | | | | | | | S0190: 1, S0188: 1, | | |
| | | | | | | | H0214: 1, H0626: 1, | | |
| | | | | | | | H0631: 1, L0611: 1, | | |
| | | | | | | | S0118: 1, S3012: 1, | | |
| | | | | | | | S0028: 1, S0206: 1, | | |
| | | | | | | | L0742: 1, L0743: 1, | | |
| | | | | | | | L0749: 1, L0756: 1, | | |
| | | | | | | | L0753: 1, L0731: 1, | | |
| | | | | | | | S0260: 1, H0595: 1, | | |
| | | | | | | | L0604: 1, L0366: 1, | | |
| | | | | | | | S0106: 1, S0192: 1, | | |
| | | | | | | | S0194: 1, S0452: 1, | | |
| | | | | | | | S0462: 1 | | |
| | | | | | | | and S0384: 1. | | |
| 104 | HSDGJ23 | 1182294 | 114 | 2-745 | 278 | Thr-1 to Ser-7. | AR061: 0, AR089: 0 | | |
| | | | | | | | H0255: 1, H0305: 1, | | |
| | | | | | | | S0044: 1, S0037: 1, | | |
| | | | | | | | S0028: 1 | | |
| | | | | | | | and S0031: 1. | | |
| | | 714160 | 172 | 148-405 | 336 | | | | |
| 105 | HCEOR02 | 1227680 | 115 | 27-818 | 279 | Glu-1 to Glu-13, | AR061: 13, AR089: 6 | | |
| | | | | | | Pro-62 to Tyr-67. | H0052: 2, L0769: 2, | | |
| | | | | | | | H0556: 1, S0282: 1, | | |
| | | | | | | | T0082: 1 | | |
| | | | | | | | and L0790: 1. | | |
| | | 921110 | 173 | 26-559 | 337 | Glu-1 to Glu-13. | | | |
| 106 | HLTEH39 | 943641 | 116 | 2-184 | 280 | Arg-5 to Leu-21. | H0521: 174, | | |
| | | | | | | | H0556: 138, | | |
| | | | | | | | H0581: 90, S0278: | | |
| | | | | | | | 66, L0665: 66, H0542: | | |
| | | | | | | | 66, S0360: 64, H0543: | | |
| | | | | | | | 61, H0046: 57, S0344: | | |
| | | | | | | | 57, L0659: 55, S0358: | | |
| | | | | | | | 54, H0271: 50, S0142: | | |
| | | | | | | | 49, H0522: 49, S0144: | | |
| | | | | | | | 48, L0664: 46, H0265: | | |
| | | | | | | | 45, H0585: 45, H0657: | | |
| | | | | | | | 42, L0655: 41, H0445: | | |
| | | | | | | | 41, H0555: 37, L0666: | | |
| | | | | | | | 36, H0518: 35, H0486: | | |
| | | | | | | | 34, L0662: 34, S0132: | | |
| | | | | | | | 33, H0318: 33, H0622: | | |
| | | | | | | | 32, S0354: 31, H0090: | | |
| | | | | | | | 31, S0372: 31, H0575: | | |
| | | | | | | | 30, H0435: 29, H0641: | | |
| | | | | | | | 27, H0635: 26, S0126: | | |
| | | | | | | | 26, H0457: 25, H0634: | | |
| | | | | | | | 25, H0436: 25, H0423: | | |
| | | | | | | | 25, H0255: 24, H0250: | | |
| | | | | | | | 24, H0069: 22, H0591: | | |
| | | | | | | | 22, S0328: 22, H0509: | | |
| | | | | | | | 21, H0658: 21, L0601: | | |
| | | | | | | | 21, H0179: 20, S0002: | | |
| | | | | | | | 20, S0374: 20, H0648: | | |
| | | | | | | | 20, H0039: 19, L0378: | | |
| | | | | | | | 19, L0663: 19, H0422: | | |
| | | | | | | | 19, S0114: 18, S0116: | | |
| | | | | | | | 18, H0586: 18, S0428: | | |
| | | | | | | | 18, H0672: 18, H0583: | | |
| | | | | | | | 17, H0617: 17, L0748: | | |
| | | | | | | | 17, H0506: 17, L0596: | | |
| | | | | | | | 16, H0580: 15, H0031: | | |
| | | | | | | | 15, L0651: 15, H0619: | | |
| | | | | | | | 14, H0150: 14, L0657: | | |
| | | | | | | | 14, H0593: 14, L0754: | | |
| | | | | | | | 14, H0638: 13, H0063: | | |
| | | | | | | | 13, H0646: 13, L0599: | | |
| | | | | | | | 13, H0663: 12, S0376: | | |
| | | | | | | | 12, H0597: 12, H0644: | | |
| | | | | | | | 12, H0087: 12, L0648: | | |
| | | | | | | | 12, S0052: 12, H0576: | | |
| | | | | | | | 12, L0751: 12, S0026: | | |
| | | | | | | | 12, L0600: 12, T0002: | | |
| | | | | | | | 11, T0049: 11, S0212: | | |
| | | | | | | | 11, H0402: 11, S0356: | | |
| | | | | | | | 11, H0427: 11, H0040: | | |
| | | | | | | | 11, H0264: 11, H0561: | | |
| | | | | | | | 11, S0426: 11, L0653: | | |
| | | | | | | | 11, S0322: 11, S0134: | | |
| | | | | | | | 10, S0218: 10, H0650: | | |
| | | | | | | | 10, H0545: 10, H0510: | | |
| | | | | | | | 10, H0416: 10, S0022: | | |
| | | | | | | | 10, S0146: 10, | | |
| | | | | | | | S0027: 10, | | |
| | | | | | | | H0014: 9, H0188: 9, | | |
| | | | | | | | H0124: 9, L0646: 9, | | |
| | | | | | | | L0374: 9, H0660: 9, | | |
| | | | | | | | S0330: 9, S0044: 9, | | |
| | | | | | | | L0740: 9, H0656: 8, | | |
| | | | | | | | H0341: 8, H0587: 8, | | |
| | | | | | | | H0599: 8, H0036: 8, | | |
| | | | | | | | H0024: 8, S0003: 8, | | |
| | | | | | | | H0560: 8, H0647: 8, | | |
| | | | | | | | L0438: 8, H0670: 8, | | |
| | | | | | | | L0757: 8, S0040: 7, | | |
| | | | | | | | H0559: 7, H0004: 7, | | |
| | | | | | | | H0085: 7, L0483: 7, | | |
| | | | | | | | H0628: 7, L0762: 7, | | |
| | | | | | | | L0647: 7, S0380: 7, | | |
| | | | | | | | S3014: 7, S0011: 7, | | |
| | | | | | | | H0550: 6, H0574: 6, | | |
| | | | | | | | H0618: 6, H0421: 6, | | |
| | | | | | | | H0544: 6, H0050: 6, | | |
| | | | | | | | H0375: 6, T0006: 6, | | |
| | | | | | | | H0553: 6, H0488: 6, | | |
| | | | | | | | S0053: 6, H0682: 6, | | |
| | | | | | | | S0378: 6, H0187: 6, | | |
| | | | | | | | L0750: 6, L0581: 6, | | |
| | | | | | | | H0141: 5, L0785: 5, | | |
| | | | | | | | H0254: 5, H0661: 5, | | |
| | | | | | | | S0140: 5, S0222: 5, | | |
| | | | | | | | H0497: 5, H0632: 5, | | |
| | | | | | | | T0060: 5, H0251: 5, | | |
| | | | | | | | H0596: 5, H0213: 5, | | |
| | | | | | | | H0181: 5, H0598: 5, | | |
| | | | | | | | H0135: 5, H0551: 5, | | |
| | | | | | | | L0369: 5, L0372: 5, | | |
| | | | | | | | L0364: 5, L0375: 5, | | |
| | | | | | | | L0382: 5, S0216: 5, | | |
| | | | | | | | H0689: 5, L0602: 5, | | |
| | | | | | | | L0744: 5, L0439: 5, | | |
| | | | | | | | S0436: 5, H0653: 5, | | |
| | | | | | | | H0665: 5, H0394: 4, | | |
| | | | | | | | H0584: 4, S0046: 4, | | |
| | | | | | | | H0640: 4, H0431: 4, | | |
| | | | | | | | H0592: 4, H0204: 4, | | |
| | | | | | | | H0086: 4, S0051: 4, | | |
| | | | | | | | H0354: 4, H0038: 4, | | |
| | | | | | | | H0059: 4, H0652: 4, | | |
| | | | | | | | L0606: 4, L0783: 4, | | |
| | | | | | | | H0691: 4, H0690: 4, | | |
| | | | | | | | H0683: 4, L0747: 4, | | |
| | | | | | | | H0444: 4, L0603: 4, | | |
| | | | | | | | H0225: 3, H0161: 3, | | |
| | | | | | | | L0808: 3, S0282: 3, | | |
| | | | | | | | H0671: 3, H0459: 3, | | |
| | | | | | | | S0420: 3, H0489: 3, | | |
| | | | | | | | S0045: 3, H0370: 3, | | |
| | | | | | | | H0392: 3, H0590: 3, | | |
| | | | | | | | T0071: 3, H0546: 3, | | |
| | | | | | | | H0373: 3, H0630: 3, | | |
| | | | | | | | H0076: 3, H0284: 3, | | |
| | | | | | | | S0214: 3, H0688: 3, | | |
| | | | | | | | H0604: 3, H0424: 3, | | |
| | | | | | | | L0142: 3, H0032: 3, | | |
| | | | | | | | H0169: 3, H0674: 3, | | |
| | | | | | | | H0376: 3, H0316: 3, | | |
| | | | | | | | H0616: 3, H0477: 3, | | |
| | | | | | | | H0487: 3, H0494: 3, | | |
| | | | | | | | H0649: 3, H0529: 3, | | |
| | | | | | | | L0763: 3, L0769: 3, | | |
| | | | | | | | L0767: 3, L0775: 3, | | |
| | | | | | | | L0607: 3, L0656: 3, | | |
| | | | | | | | L0517: 3, L0542: 3, | | |
| | | | | | | | L0518: 3, L0782: 3, | | |
| | | | | | | | H0144: 3, H0684: 3, | | |
| | | | | | | | H0659: 3, H0666: 3, | | |
| | | | | | | | L0752: 3, S0434: 3, | | |
| | | | | | | | L0591: 3, L0592: 3, | | |
| | | | | | | | L0485: 3, L0362: 3, | | |
| | | | | | | | H0685: 2, H0664: 2, | | |
| | | | | | | | H0306: 2, H0125: 2, | | |
| | | | | | | | S0410: 2, S0300: 2, | | |
| | | | | | | | H0351: 2, H0549: 2, | | |
| | | | | | | | H0492: 2, L0586: 2, | | |
| | | | | | | | H0013: 2, H0191: 2, | | |
| | | | | | | | H0042: 2, H0274: 2, | | |
| | | | | | | | S0474: 2, H0309: 2, | | |
| | | | | | | | H0263: 2, H0235: 2, | | |
| | | | | | | | H0231: 2, H0123: 2, | | |
| | | | | | | | T0003: 2, H0015: 2, | | |
| | | | | | | | H0629: 2, H0060: 2, | | |
| | | | | | | | H0687: 2, H0286: 2, | | |
| | | | | | | | T0023: 2, H0030: 2, | | |
| | | | | | | | H0111: 2, H0182: 2, | | |
| | | | | | | | H0606: 2, H0388: 2, | | |
| | | | | | | | H0189: 2, S0036: 2, | | |
| | | | | | | | H0623: 2, H0102: 2, | | |
| | | | | | | | H0100: 2, L0475: 2, | | |
| | | | | | | | H0625: 2, S0294: 2, | | |
| | | | | | | | L0065: 2, S0438: 2, | | |
| | | | | | | | S0422: 2, L0637: 2, | | |
| | | | | | | | L0627: 2, L0642: 2, | | |
| | | | | | | | L0654: 2, L0527: 2, | | |
| | | | | | | | L0636: 2, L0540: 2, | | |
| | | | | | | | S0174: 2, H0134: 2, | | |
| | | | | | | | S0404: 2, S0406: 2, | | |
| | | | | | | | L0777: 2, L0755: 2, | | |
| | | | | | | | L0758: 2, L0759: 2, | | |
| | | | | | | | S0031: 2, S0308: 2, | | |
| | | | | | | | H0343: 2, L0588: 2, | | |
| | | | | | | | L0605: 2, L0595: 2, | | |
| | | | | | | | L0361: 2, H0668: 2, | | |
| | | | | | | | H0667: 2, S0456: 2, | | |
| | | | | | | | H0395: 1, H0224: 1, | | |
| | | | | | | | H0139: 1, H0159: 1, | | |
| | | | | | | | S0470: 1, S0342: 1, | | |
| | | | | | | | S0402: 1, H0662: 1, | | |
| | | | | | | | H0300: 1, S0442: 1, | | |
| | | | | | | | S0444: 1, H0675: 1, | | |
| | | | | | | | S0408: 1, H0208: 1, | | |
| | | | | | | | H0645: 1, H0393: 1, | | |
| | | | | | | | H0411: 1, H0437: 1, | | |
| | | | | | | | H0369: 1, H0608: 1, | | |
| | | | | | | | H0442: 1, H0409: 1, | | |
| | | | | | | | H0600: 1, H0333: 1, | | |
| | | | | | | | H0331: 1, H0257: 1, | | |
| | | | | | | | L0622: 1, L0623: 1, | | |
| | | | | | | | H0485: 1, N0009: 1, | | |
| | | | | | | | H0101: 1, S0280: 1, | | |
| | | | | | | | H0156: 1, L0021: 1, | | |
| | | | | | | | H0053: 1, H0349: 1, | | |
| | | | | | | | H0025: 1, H0253: 1, | | |
| | | | | | | | H0196: 1, H0194: 1, | | |
| | | | | | | | H0184: 1, L0040: 1, | | |
| | | | | | | | H0327: 1, H0439: 1, | | |
| | | | | | | | H0045: 1, H0041: 1, | | |
| | | | | | | | N0006: 1, H0081: 1, | | |
| | | | | | | | H0620: 1, L0163: 1, | | |
| | | | | | | | T0010: 1, H0083: 1, | | |
| | | | | | | | H0109: 1, H0247: 1, | | |
| | | | | | | | H0266: 1, S0316: 1, | | |
| | | | | | | | H0290: 1, H0292: 1, | | |
| | | | | | | | S0314: 1, S0250: 1, | | |
| | | | | | | | H0252: 1, H0615: 1, | | |
| | | | | | | | H0428: 1, L0194: 1, | | |
| | | | | | | | H0150: 1, L0055: 1, | | |
| | | | | | | | H0165: 1, S0364: 1, | | |
| | | | | | | | H0361: 1, S0366: 1, | | |
| | | | | | | | H0163: 1, H0372: 1, | | |
| | | | | | | | H0433: 1, T0069: 1, | | |
| | | | | | | | L0370: 1, T0041: 1, | | |
| | | | | | | | S0370: 1, S0382: 1, | | |
| | | | | | | | S0306: 1, S0466: 1, | | |
| | | | | | | | S0440: 1, H0538: 1, | | |
| | | | | | | | L0598: 1, L0520: 1, | | |
| | | | | | | | L0640: 1, L0371: 1, | | |
| | | | | | | | L0535: 1, L0631: 1, | | |
| | | | | | | | L0638: 1, L0761: 1, | | |
| | | | | | | | L0630: 1, L0772: 1, | | |
| | | | | | | | L0373: 1, L0641: 1, | | |
| | | | | | | | L0765: 1, L0771: 1, | | |
| | | | | | | | L0521: 1, L0768: 1, | | |
| | | | | | | | L0766: 1, L0386: 1, | | |
| | | | | | | | L0774: 1, L0806: 1, | | |
| | | | | | | | L0652: 1, L0776: 1, | | |
| | | | | | | | L0661: 1, L0628: 1, | | |
| | | | | | | | L0658: 1, L0547: 1, | | |
| | | | | | | | L0546: 1, L0383: 1, | | |
| | | | | | | | L0519: 1, L0545: 1, | | |
| | | | | | | | L0528: 1, T0068: 1, | | |
| | | | | | | | S0148: 1, H0519: 1, | | |
| | | | | | | | S0122: 1, H0579: 1, | | |
| | | | | | | | S0332: 1, S0350: 1, | | |
| | | | | | | | S0190: 1, S0188: 1, | | |
| | | | | | | | H0214: 1, H0626: 1, | | |
| | | | | | | | H0631: 1, L0611: 1, | | |
| | | | | | | | S0118: 1, S3012: 1, | | |
| | | | | | | | S0028: 1, S0206: 1, | | |
| | | | | | | | L0742: 1, L0743: 1, | | |
| | | | | | | | L0749: 1, L0756: 1, | | |
| | | | | | | | L0753: 1, L0731: 1, | | |
| | | | | | | | S0260: 1, H0595: 1, | | |
| | | | | | | | L0604: 1, L0366: 1, | | |
| | | | | | | | S0106: 1, S0192: 1, | | |
| | | | | | | | S0194: 1, S0452: 1, | | |
| | | | | | | | S0462: 1 | | |
| | | | | | | | and S0384: 1. | | |
| 107 | HRODF07 | 1222093 | 117 | 830-1138 | 281 | | AR061: 5, AR089: 4 | | |
| | | | | | | | S0328: 7, S0330: 7, | | |
| | | | | | | | L0648: 6, L0549: 5, | | |
| | | | | | | | H0329: 1, H0039: 1, | | |
| | | | | | | | H0598: 1, S0352: 1, | | |
| | | | | | | | L0551: 1, S0432: 1 | | |
| | | | | | | | and L0755: 1. | | |
| | | 952426 | 174 | 31-195 | 338 | | | | |

[0040] The first column in Table 1A provides the gene number in the application corresponding to the clone identifier. The second column in Table 1A provides a unique “Clone ID NO:Z” for a cDNA clone related to each contig sequence disclosed in Table 1A. This clone ID references the cDNA clone which contains at least the 5′ most sequence of the assembled contig and at least a portion of SEQ ID NO:X was determined by directly sequencing the referenced clone. The reference clone may have more sequence than described in the sequence listing or the clone may have less. In the vast majority of cases, however, the clone is believed to encode a full-length polypeptide. In the case where a clone is not full-length, a full-length cDNA can be obtained by methods described elsewhere herein.

[0041] The third column in Table 1A provides a unique “Contig ID” identification for each contig sequence. The fourth column provides the “SEQ ID NO:” identifier for each of the contig polynucleotide sequences disclosed in Table 1A. The fifth column, “ORF (From-To)”, provides the location (i.e., nucleotide position numbers) within the polynucleotide sequence “SEQ ID NO:X” that delineate the preferred open reading frame (ORF) shown in the sequence listing and referenced in Table 1A, column 6, as SEQ ID NO:Y. Where the nucleotide position number “To” is lower than the nucleotide position number “From”, the preferred ORF is the reverse complement of the referenced polynucleotide sequence.

[0042] The sixth column in Table 1A provides the corresponding SEQ ID NO:Y for the polypeptide sequence encoded by the preferred ORF delineated in column 5. In one embodiment, the invention provides an amino acid sequence comprising, or alternatively consisting of, a polypeptide encoded by the portion of SEQ ID NO:X delineated by “ORF (From-To)”. Also provided are polynucleotides encoding such amino acid sequences and the complementary strand thereto.

[0043] Column 7 in Table 1A lists residues comprising epitopes contained in the polypeptides encoded by the preferred ORF (SEQ ID NO:Y), as predicted using the algorithm of Jameson and Wolf, (1988) Comp. Appl. Biosci. 4:181-186. The Jameson-Wolf antigenic analysis was performed using the computer program PROTEAN (Version 3.11 for the Power MacIntosh, DNASTAR, Inc., 1228 South Park Street Madison, Wis.). In specific embodiments, polypeptides of the invention comprise, or alternatively consist of, at least one, two, three, four, five or more of the predicted epitopes as described in Table 1A. It will be appreciated that depending on the analytical criteria used to predict antigenic determinants, the exact address of the determinant may vary slightly.

[0044] Column 8 in Table 1A provides an expression profile and library code: count for each of the contig sequences (SEQ ID NO:X) disclosed in Table 1A, which can routinely be combined with the information provided in Table 4 and used to determine the tissues, cells, and/or cell line libraries which predominantly express the polynucleotides of the invention. The first number in column 8 (preceding the colon), represents the tissue/cell source identifier code corresponding to the code and description provided in Table 4. For those identifier codes in which the first two letters are not “AR”, the second number in column 8 (following the colon) represents the number of times a sequence corresponding to the reference polynucleotide sequence was identified in the tissue/cell source. Those tissue/cell source identifier codes in which the first two letters are “AR” designate information generated using DNA array technology. Utilizing this technology, cDNAs were amplified by PCR and then transferred, in duplicate, onto the array. Gene expression was assayed through hybridization of first strand cDNA probes to the DNA array. cDNA probes were generated from total RNA extracted from a variety of different tissues and cell lines. Probe synthesis was performed in the presence of ³³P dCTP, using oligo(dT) to prime reverse transcription. After hybridization, high stringency washing conditions were employed to remove non-specific hybrids from the array. The remaining signal, emanating from each gene target, was measured using a Phosphorimager. Gene expression was reported as Phosphor Stimulating Luminescence (PSL) which reflects the level of phosphor signal generated from the probe hybridized to each of the gene targets represented on the array. A local background signal subtraction was performed before the total signal generated from each array was used to normalize gene expression between the different hybridizations. The value presented after “[array code]:” represents the mean of the duplicate values, following background subtraction and probe normalization. One of skill in the art could routinely use this information to identify normal and/or diseased tissue(s) which show a predominant expression pattern of the corresponding polynucleotide of the invention or to identify polynucleotides which show predominant and/or specific tissue and/or cell expression.

[0045] Column 9 in Table 1A provides a chromosomal map location for certain polynucleotides of the invention. Chromosomal location was determined by finding exact matches to EST and cDNA sequences contained in the NCBI (National Center for Biotechnology Information) UniGene database. Each sequence in the UniGene database is assigned to a “cluster”; all of the ESTs, cDNAs, and STSs in a cluster are believed to be derived from a single gene. Chromosomal mapping data is often available for one or more sequence(s) in a UniGene cluster; this data (if consistent) is then applied to the cluster as a whole. Thus, it is possible to infer the chromosomal location of a new polynucleotide sequence by determining its identity with a mapped UniGene cluster.

[0046] A modified version of the computer program BLASTN (Altshul et al., J. Mol. Biol. 215:403-410 (1990); and Gish and States, Nat. Genet. 3:266-272 (1993)) was used to search the UniGene database for EST or cDNA sequences that contain exact or near-exact matches to a polynucleotide sequence of the invention (the ‘Query’). A sequence from the UniGene database (the ‘Subject’) was said to be an exact match if it contained a segment of 50 nucleotides in length such that 48 of those nucleotides were in the same order as found in the Query sequence. If all of the matches that met this criteria were in the same UniGene cluster, and mapping data was available for this cluster, it is indicated in Table 1A under the heading “Cytologic Band”. Where a cluster had been further localized to a distinct cytologic band, that band is disclosed; where no banding information was available, but the gene had been localized to a single chromosome, the chromosome is disclosed.

[0047] Once a presumptive chromosomal location was determined for a polynucleotide of the invention, an associated disease locus was identified by comparison with a database of diseases which have been experimentally associated with genetic loci. The database used was the Morbid Map, derived from OMIM™ (supra). If the putative chromosomal location of a polynucleotide of the invention (Query sequence) was associated with a disease in the Morbid Map database, an OMIM reference identification number was noted in column 10, Table 1A, labelled “OMIM Disease Reference(s)”. Table 5 is a key to the OMIM reference identification numbers (column 1), and provides a description of the associated disease in Column 2.

TABLE 1B

| Clone ID | SEQ ID | CONTIG | | SEQ ID | EXON |
|---|---|---|---|---|---|
| NO: Z | NO: X | ID: | BAC ID: A | NO: B | From-To |
| HMSKF13 | 12 | 708207 | AC023891 | 339 | 1-32 |
| | | | | | 159-474 |
| | | | | | 659-1496 |
| | | | | | 2796-2957 |
| | | | | | 3160-3603 |
| | | | | | 5493-5676 |
| | | | | | 8391-8506 |
| | | | | | 8716-8880 |
| | | | | | 8891-9116 |
| | | | | | 9977-10703 |
| | | | | | 11326-12477 |
| HMSKF13 | 12 | 708207 | AC023891 | 340 | 1-169 |
| HLHCT68 | 13 | 764745 | AC010344 | 341 | 1-121 |
| | | | | | 2985-3815 |
| | | | | | 4282-4423 |
| HLHCT68 | 13 | 764745 | AC008496 | 342 | 1-96 |
| | | | | | 2321-2645 |
| | | | | | 5406-5532 |
| | | | | | 5545-5688 |
| | | | | | 6055-6205 |
| | | | | | 9065-9895 |
| | | | | | 10362-10503 |
| HLHCT68 | 13 | 764745 | AC010344 | 343 | 1-144 |
| HLHCT68 | 13 | 764745 | AC010344 | 344 | 1-2396 |
| HLHCT68 | 13 | 764745 | AC008496 | 345 | 1-1684 |
| HMWDR50 | 19 | 667595 | AB014080 | 346 | 1-748 |
| | | | | | 763-1070 |
| | | | | | 1455-2783 |
| | | | | | 2926-4756 |
| HMWDR50 | 19 | 667595 | AC006139 | 347 | 1-748 |
| | | | | | 763-1070 |
| | | | | | 1455-2783 |
| | | | | | 2926-4756 |
| HMWDR50 | 19 | 667595 | AB014080 | 348 | 1-276 |
| | | | | | 1137-2218 |
| | | | | | 3982-4096 |
| HMWDR50 | 19 | 667595 | AC006139 | 349 | 1-115 |
| HUFAK35 | 25 | 636241 | AC004172 | 350 | 1-92 |
| | | | | | 195-494 |
| | | | | | 721-1360 |
| | | | | | 1581-1892 |
| HUFAK35 | 25 | 636241 | AC004204 | 351 | 1-1285 |
| | | | | | 1392-3372 |
| HUFAK35 | 25 | 636241 | AC004182 | 352 | 1-2744 |
| | | | | | 2917-3357 |
| HUFAK35 | 25 | 636241 | AC018433 | 353 | 1-2744 |
| | | | | | 2917-3357 |
| HUFAK35 | 25 | 636241 | AC004204 | 354 | 1-351 |
| HWBAO18 | 30 | 751125 | AL136222 | 355 | 1-35 |
| | | | | | 90-146 |
| | | | | | 603-976 |
| | | | | | 1504-1816 |
| | | | | | 1908-2118 |
| | | | | | 2389-2496 |
| | | | | | 3139-4163 |
| | | | | | 5195-5455 |
| | | | | | 5670-5784 |
| | | | | | 5971-6356 |
| | | | | | 6876-7025 |
| | | | | | 7363-7661 |
| HWBAO18 | 30 | 751125 | AL109947 | 356 | 1-35 |
| | | | | | 90-146 |
| | | | | | 603-976 |
| | | | | | 1504-1816 |
| | | | | | 1908-2118 |
| | | | | | 2389-2496 |
| | | | | | 3139-4163 |
| | | | | | 5195-5455 |
| | | | | | 5670-5784 |
| | | | | | 5971-6356 |
| | | | | | 6875-7024 |
| | | | | | 7362-8082 |
| | | | | | 8097-9620 |
| | | | | | 9776-9985 |
| | | | | | 10108-10621 |
| | | | | | 10759-10899 |
| | | | | | 10954-11030 |
| | | | | | 11405-11696 |
| HWBAO18 | 30 | 751125 | AL359711 | 357 | 1-35 |
| | | | | | 90-146 |
| | | | | | 603-976 |
| | | | | | 1504-1816 |
| | | | | | 1908-2118 |
| | | | | | 2389-2496 |
| | | | | | 3139-4163 |
| | | | | | 5195-5455 |
| | | | | | 5670-5784 |
| | | | | | 5971-6356 |
| | | | | | 6875-7024 |
| | | | | | 7362-8082 |
| | | | | | 8097-9620 |
| | | | | | 9776-9985 |
| | | | | | 10108-10621 |
| | | | | | 10759-10899 |
| | | | | | 10954-11030 |
| | | | | | 11405-11696 |
| HWBAO18 | 30 | 751125 | AL136222 | 358 | 1-532 |
| HWBAO18 | 30 | 751125 | AL109947 | 359 | 1-479 |
| | | | | | 502-655 |
| | | | | | 841-948 |
| | | | | | 1038-1393 |
| | | | | | 1624-1713 |
| | | | | | 1856-1951 |
| | | | | | 2057-2373 |
| | | | | | 2467-2567 |
| | | | | | 2696-3160 |
| HWBAO18 | 30 | 751125 | AL359711 | 360 | 1-479 |
| | | | | | 502-655 |
| | | | | | 841-948 |
| | | | | | 1038-1393 |
| | | | | | 1624-1713 |
| | | | | | 1856-1951 |
| | | | | | 2057-2373 |
| | | | | | 2467-2567 |
| | | | | | 2696-3160 |
| HWBAO18 | 30 | 751125 | AL109947 | 361 | 1-532 |
| HWBAO18 | 30 | 751125 | AL359711 | 362 | 1-532 |
| HGBDG55 | 35 | 815858 | AL360268 | 363 | 1-201 |
| | | | | | 2570-2699 |
| | | | | | 2786-2870 |
| | | | | | 3478-4132 |
| HE8PY29 | 45 | 887862 | AC009948 | 364 | 1-385 |
| | | | | | 1363-1519 |
| | | | | | 3205-3305 |
| | | | | | 5439-5548 |
| | | | | | 7982-8455 |
| | | | | | 8792-8926 |
| | | | | | 10682-10771 |
| | | | | | 12645-14919 |
| HE8PY29 | 45 | 887862 | AC009948 | 365 | 1-439 |
| HE8PY29 | 45 | 887862 | AC009948 | 366 | 1-569 |
| HMKCH92 | 47 | 910936 | AC026206 | 367 | 1-52 |
| | | | | | 416-535 |
| | | | | | 1184-1340 |
| | | | | | 1502-1651 |
| | | | | | 4581-4649 |
| | | | | | 10517-10753 |
| | | | | | 10870-10987 |
| | | | | | 13190-13220 |
| HMKCH92 | 47 | 910936 | AC034192 | 368 | 1-52 |
| | | | | | 416-535 |
| | | | | | 1184-1338 |
| | | | | | 1500-1651 |
| | | | | | 4583-4659 |
| | | | | | 10526-10754 |
| | | | | | 10871-10957 |
| HMKCH92 | 47 | 910936 | AC022381 | 369 | 1-52 |
| | | | | | 416-535 |
| | | | | | 1184-1340 |
| | | | | | 1502-1651 |
| | | | | | 4583-4651 |
| | | | | | 10520-10756 |
| | | | | | 10873-10990 |
| | | | | | 13187-13217 |
| HMKCH92 | 47 | 910936 | AC026206 | 370 | 1-107 |
| HMKCH92 | 47 | 910936 | AC022381 | 371 | 1-107 |
| HSOBC04 | 56 | 927280 | AC012192 | 372 | 1-892 |
| | | | | | 1064-1588 |
| | | | | | 1828-2485 |
| | | | | | 2619-2673 |
| | | | | | 2847-3001 |
| | | | | | 3025-3053 |
| | | | | | 3060-3223 |
| | | | | | 3526-3729 |
| | | | | | 3873-5129 |
| | | | | | 6990-7582 |
| HHFOC79 | 60 | 935406 | AC008745 | 373 | 1-707 |
| HBGMG39 | 71 | 971414 | AL390719 | 374 | 1-1344 |
| | | | | | 1786-2894 |
| HMTAV95 | 74 | 614936 | AL137000 | 375 | 1-47 |
| | | | | | 321-642 |
| | | | | | 2386-2508 |
| | | | | | 3316-3493 |
| | | | | | 4104-4572 |
| | | | | | 6015-6340 |
| | | | | | 6520-6573 |
| HMTAV95 | 74 | 614936 | AL137000 | 376 | 1-539 |
| HMTAV95 | 74 | 614936 | AL137000 | 377 | 1-510 |
| HCQCI06 | 86 | 915000 | AC068763 | 378 | 1-590 |
| | | | | | 819-1083 |
| HCQCI06 | 86 | 915000 | AC069223 | 379 | 1-362 |
| HCQCI06 | 86 | 915000 | AC068763 | 380 | 1-593 |
| HE8UT58 | 100 | 973153 | AC032004 | 381 | 1-120 |
| HBGQN46 | 110 | 945370 | AF038458 | 382 | 1-630 |
| | | | | | 1311-1416 |
| | | | | | 2481-4022 |
| | | | | | 4952-5252 |
| | | | | | 6370-6479 |
| | | | | | 7623-8269 |
| HLTEH39 | 116 | 943641 | AC004204 | 383 | 1-1285 |
| | | | | | 1392-3372 |
| HLTEH39 | 116 | 943641 | AC004204 | 384 | 1-351 |

[0048] Table 1B summarizes additional polynucleotides encompassed by the invention (including cDNA clones related to the sequences (Clone ID NO:Z), contig sequences (contig identifier (Contig ID:) contig nucleotide sequence identifiers (SEQ ID NO:X)), and genomic sequences (SEQ ID NO:B). The first column provides a unique clone identifier, “Clone ID NO:Z”, for a cDNA clone related to each contig sequence. The second column provides the sequence identifier, “SEQ ID NO:X”, for each contig sequence. The third column provides a unique contig identifier, “Contig ID:” for each contig sequence. The fourth column, provides a BAC identifier “BAC ID NO:A” for the BAC clone referenced in the corresponding row of the table. The fifth column provides the nucleotide sequence identifier, “SEQ ID NO:B” for a fragment of the BAC clone identified in column four of the corresponding row of the table. The sixth column, “Exon From-To”, provides the location (i.e., nucleotide position numbers) within the polynucleotide sequence of SEQ ID NO:B which delineate certain polynucleotides of the invention that are also exemplary members of polynucleotide sequences that encode polypeptides of the invention (e.g., polypeptides containing amino acid sequences encoded by the polynucleotide sequences delineated in column six, and fragments and variants thereof).

TABLE 2

| | | SEQ | | | PFam/NR | Score/ | | |
|---|---|---|---|---|---|---|---|---|
| Clone ID | Contig | ID | Analysis | PFam/NR | Accession | Percent | NT | NT |
| NO: Z | ID: | NO: X | Method | Description | Number | Identity | From | To |
| HTTEK47 | 573649 | 11 | HMMER | PFAM: EF hand | PF00036 | 10.82 | 224 | 289 |
| | | | 1.8 | | | | | |
| | | | blastx.2 | DJ534K7.2 (novel | sp\|CAB92087\| | 100% | 11 | 301 |
| | | | | protein). | CAB92087 | 65% | 283 | 378 |
| | | | | | | 52% | 342 | 410 |
| HMSKF13 | 708207 | 12 | HMMER | PFAM: Fibronectin type | PF00041 | 10.64 | 98 | 193 |
| | | | 1.8 | III domain | | | | |
| HLHCT68 | 764745 | 13 | HMMER | PFAM: Fibronectin type | PF00041 | 16.02 | 65 | 136 |
| | | | 1.8 | III domain | | | | |
| HKAFF33 | 974200 | 14 | HMMER | PFAM: Class I | PF00129 | 58.44 | 56 | 127 |
| | | | 1.8 | Histocompatibility | | | | |
| | | | | antigen, domains alpha 1 | | | | |
| | | | | and 2 | | | | |
| HTLAQ18 | 811792 | 118 | HMMER | PFAM: Fibronectin type | PF00041 | 31.34 | 56 | 331 |
| | | | 1.8 | III domain | | | | |
| | | | blastx.2 | hypothetical protein | pir\|T42656\| | 96% | 11 | 457 |
| | | | | DKFZp434H2215.1 - | T42656 | | | |
| | | | | human | | | | |
| HLYAW15 | 974192 | 119 | HMMER | PFAM: Class I | PF00129 | 330.87 | 87 | 488 |
| | | | 1.8 | Histocompatibility | | | | |
| | | | | antigen, domains alpha 1 | | | | |
| | | | | and 2 | | | | |
| HMCFY36 | 943638 | 17 | HMMER | PFAM: Class I | PF00129 | 164.66 | 1 | 216 |
| | | | 1.8 | Histocompatibility | | | | |
| | | | | antigen, domains alpha 1 | | | | |
| | | | | and 2 | | | | |
| HMSPF61 | 861249 | 120 | HMMER | PFAM: Phytoene | PF02032 | 53.7 | 424 | 573 |
| | | | 2.1.1 | dehydrogenase related | | | | |
| | | | | enzyme | | | | |
| HMWDR50 | 667595 | 19 | HMMER | PFAM: Class I | PF00129 | 69.78 | 347 | 535 |
| | | | 1.8 | Histocompatibility | | | | |
| | | | | antigen, domains alpha 1 | | | | |
| | | | | and 2 | | | | |
| HSSJM44 | 871067 | 121 | HMMER | PFAM: Fibronectin type | PF00041 | 8.5 | 694 | 936 |
| | | | 1.8 | III domain | | | | |
| HPTXN38 | 974195 | 21 | HMMER | PFAM: Class I | PF00129 | 161.95 | 15 | 350 |
| | | | 1.8 | Histocompatibility | | | | |
| | | | | antigen, domains alpha 1 | | | | |
| | | | | and 2 | | | | |
| HRKPA05 | 974201 | 22 | HMMER | PFAM: Class I | PF00129 | 32.12 | 36 | 77 |
| | | | 1.8 | Histocompatibility | | | | |
| | | | | antigen, domains alpha 1 | | | | |
| | | | | and 2 | | | | |
| HTGFY58 | 974198 | 23 | HMMER | PFAM: Class I | PF00129 | 151.01 | 23 | 217 |
| | | | 1.8 | Histocompatibility | | | | |
| | | | | antigen, domains alpha 1 | | | | |
| | | | | and 2 | | | | |
| HTXJB01 | 542372 | 122 | HMMER | PFAM: Class I | PF00129 | 54.86 | 54 | 398 |
| | | | 1.8 | Histocompatibility | | | | |
| | | | | antigen, domains alpha 1 | | | | |
| | | | | and 2 | | | | |
| HUFAK35 | 636241 | 25 | HMMER | PFAM: Class I | PF00129 | 69.9 | 28 | 120 |
| | | | 2.1.1 | Histocompatibility | | | | |
| | | | | antigen, domains alpha 1 | | | | |
| | | | | and 2 | | | | |
| HWHKC91 | 974191 | 26 | HMMER | PFAM: Class I | PF00129 | 116.47 | 75 | 218 |
| | | | 1.8 | Histocompatibility | | | | |
| | | | | antigen, domains alpha 1 | | | | |
| | | | | and 2 | | | | |
| HTSFJ40 | 1172826 | 27 | blastx.14 | similar to hypothetical | gi\|2633977\|emb\| | 39% | 105 | 311 |
| | | | | proteins [Bacillus | CAB13478.1\| | 37% | 426 | 545 |
| | | | | subtilis] | | 31% | 321 | 377 |
| HTSFJ40 | 722406 | 123 | HMMER | PFAM: GTPase of | PF01926 | 37.5 | 96 | 356 |
| | | | 2.1.1 | unknown function | | | | |
| HEONO59 | 741361 | 28 | HMMER | PFAM: Fibronectin type | PF00041 | 39.4 | 508 | 582 |
| | | | 2.1.1 | III domain | | | | |
| | | | blastx.2 | HOST CELL FACTOR 2. | sp\|Q9Y5Z7\| | 99% | 331 | 702 |
| | | | | | Q9Y5Z7 | 74% | 29 | 253 |
| | | | | | | 97% | 707 | 847 |
| HEMBZ62 | 1078797 | 29 | blastx.14 | (AJ235273) POSSIBLE | gi\|3861288\|emb\| | 39% | 4 | 297 |
| | | | | THIOPHENE AND | CAA15187.1\| | 30% | 643 | 849 |
| | | | | FURAN OXIDATION | | 37% | 298 | 402 |
| | | | | PROTEIN THDF (thdF) | | | | |
| | | | | [Rickettsia prowazekii] | | | | |
| HEMBZ62 | 742551 | 124 | HMMER | PFAM: GTPase of | PF01926 | 42.4 | 23 | 175 |
| | | | 2.1.1 | unknown function | | | | |
| HWBAO18 | 751125 | 30 | HMMER | PFAM: FAD binding | PF01494 | 25.1 | 313 | 396 |
| | | | 2.1.1 | domain | | | | |
| | | | blastx.2 | CG11685 PROTEIN. | sp\|Q9VH40\| | 53% | 196 | 396 |
| | | | | | Q9VH40 | | | |
| HTLEN77 | 1147024 | 31 | blastx.14 | (AF081671) VU91D | gi\|3800851\| | 43% | 233 | 385 |
| | | | | calmodulin [synthetic | gb\|AAC68892.1\| | | | |
| | | | | construct] | | | | |
| HTLEN77 | 772363 | 125 | HMMER | PFAM: EF hand | PF00036 | 26.93 | 294 | 380 |
| | | | 1.8 | | | | | |
| | | | blastx.2 | CALTRACTIN | sp\|P53441\| | 30% | 111 | 374 |
| | | | | (CENTRIN). | CATR_NAEGR | | | |
| HTADZ74 | 1172825 | 32 | blastx.14 | (AF077346) interleukin- | gi\|3851060\| | 90% | 19 | 897 |
| | | | | 18 receptor accessory | gb\|AAC72196.1\| | | | |
| | | | | protein-like [Homo | | | | |
| | | | | sapiens] | | | | |
| HTADZ74 | 811489 | 126 | HMMER | PFAM: TIR domain | PF01582 | 53.1 | 305 | 538 |
| | | | 2.1.1 | | | | | |
| HELHB88 | 811935 | 127 | HMMER | PFAM: EF hand | PF00036 | 12.8 | 247 | 330 |
| | | | 1.8 | | | | | |
| | | | blastx.2 | INTERSECTIN LONG | sp\|Q9UNK2\| | 84% | 139 | 567 |
| | | | | ISOFORM. | Q9UNK2 | 46% | 145 | 375 |
| | | | | | | 100% | 78 | 146 |
| | | | | | | 30% | 361 | 495 |
| HE9TD31 | 815845 | 34 | HMMER | PFAM: EF hand | PF00036 | 17.53 | 519 | 605 |
| | | | 1.8 | | | | | |
| | | | blastx.2 | Intersectin 2 short | sp\|AAF59904\| | 81% | 3 | 626 |
| | | | | isoform. | AAF59904 | 40% | 378 | 626 |
| HGBDG55 | 815858 | 35 | HMMER | PFAM: EF hand | PF00036 | 17.24 | 302 | 385 |
| | | | 1.8 | | | | | |
| | | | blastx.2 | Calcium-binding | sp\|AAF28888\| | 61% | 209 | 388 |
| | | | | transporter (Fragment). | AAF28888 | 64% | 381 | 530 |
| | | | | | | 37% | 284 | 388 |
| HOUHL51 | 815891 | 128 | HMMER | PFAM: EF hand | PF00036 | 29.3 | 429 | 506 |
| | | | 2.1.1 | | | | | |
| | | | blastx.2 | CENTRTN, PUTATIVE. | sp\|Q9U5I9\| | 26% | 48 | 506 |
| | | | | | Q9U5I9 | | | |
| HEOPP67 | 827630 | 37 | HMMER | PFAM: EF hand | PF00036 | 35 | 233 | 316 |
| | | | 2.1.1 | | | | | |
| | | | blastx.2 | NADPH thyroid oxidase | sp\|AAF73922\| | 98% | 56 | 433 |
| | | | | 2. | AAF73922 | | | |
| HKAOV71 | 827679 | 38 | HMMER | PFAM: EF hand | PF00036 | 50.7 | 220 | 300 |
| | | | 2.1.1 | | | | | |
| | | | blastx.2 | Calcium-binding | sp\|AAF28888\| | 88% | 61 | 753 |
| | | | | transporter (Fragment). | AAF28888 | 93% | 711 | 755 |
| HFIJC31 | 828148 | 39 | HMMER | PFAM: Fibronectin type | PF00041 | 22.67 | 138 | 404 |
| | | | 1.8 | III domain | | | | |
| HDQID90 | 831976 | 40 | HMMER | PFAM: EF hand | PF00036 | 10.08 | 413 | 496 |
| | | | 1.8 | | | | | |
| | | | blastx.2 | Intersectin 2. | sp\|AAF63600\| | 87% | 206 | 694 |
| | | | | | AAF63600 | 36% | 272 | 565 |
| HKACD80 | 837698 | 129 | HMMER | PFAM: Glycosyl | PF01532 | 125.1 | 198 | 521 |
| | | | 2.1.1 | hydrolase family 47 | | | | |
| | | | blastx.2 | CDNA FLJ10783 FIS, | sp\|BAA91806\| | 90% | 165 | 521 |
| | | | | CLONE NT2RP4000417, | BAA91806 | 49% | 511 | 687 |
| | | | | WEAKLY SIMILAR TO | | 71% | 508 | 570 |
| | | | | 1 | | 65% | 624 | 683 |
| | | | | | | 63% | 605 | 637 |
| HTEED80 | 849075 | 42 | HMMER | PFAM: Fibronectin type | PF00041 | 12.84 | 521 | 808 |
| | | | 1.8 | III domain | | | | |
| | | | blastx.2 | CDNA FLJ10688 FIS, | sp\|BAA91751\| | 99% | 254 | 850 |
| | | | | CLONE NT2RP3000320, | BAA91751 | 80% | 1 | 267 |
| | | | | HIGHLY SIMILAR TO 11 | | | | |
| HE8TI39 | 849161 | 130 | HMMER | PFAM: EF hand | PF00036 | 12.66 | 9 | 86 |
| | | | 1.8 | | | | | |
| | | | blastx.2 | CDNA FLJ11040 FIS, | sp\|BAA91969\| | 98% | 3 | 371 |
| | | | | CLONE PLACE1004388. | BAA91969 | 64% | 299 | 685 |
| | | | | | | 63% | 627 | 719 |
| HSDJH12 | 1163916 | 44 | blastx.14 | (AK002163) unnamed | gi\|7023874\| | 99% | 60 | 530 |
| | | | | protein product [Homo | dbj\| | | | |
| | | | | sapiens] | BAA92116.1\| | | | |
| HSDJH12 | 876344 | 131 | HMMER | PFAM: GTPase of | PF01926 | 115.7 | 207 | 572 |
| | | | 2.1.1 | unknown function | | | | |
| HE8PY29 | 887862 | 45 | HMMER | PFAM: EF hand | PF00036 | 13.65 | 191 | 250 |
| | | | 1.8 | | | | | |
| | | | blastx.2 | FK506-BINDING | sp\|Q9Y6B0\| | 100% | 2 | 277 |
| | | | | PROTEIN. | Q9Y6B0 | | | |
| HNTMB90 | 910934 | 46 | HMMER | PFAM: Fibronectin type | PF00041 | 71.5 | 204 | 470 |
| | | | 2.1.1 | III domain | | | | |
| | | | blastx.2 | Neighbor of Punc el 1 | sp\|AAF65930\| | 35% | 87 | 515 |
| | | | | protein. | AAF65930 | | | |
| HMKCH92 | 910936 | 47 | HMMER | PFAM: Fibronectin type | PF00041 | 75.15 | 174 | 443 |
| | | | 1.8 | III domain | | | | |
| | | | blastx.2 | NEURAL ADHESION | sp\|Q9UQ52\| | 93% | 102 | 680 |
| | | | | MOLECULE NB-3. | Q9UQ52 | 100% | 2 | 103 |
| | | | | | | 97% | 700 | 801 |
| | | | | | | 26% | 135 | 605 |
| | | | | | | 24% | 228 | 602 |
| HTELV86 | 1126499 | 48 | blastx.14 | neural cell adhesion | gi\|1016012\| | 96% | 1506 | 178 |
| | | | | protein BIG-2 precursor | gb\|AAC52262.1\| | | | |
| | | | | [Rattus norvegicus] | | | | |
| HTELV86 | 910946 | 132 | HMMER | PFAM: Fibronectin type | PF00041 | 77.22 | 400 | 669 |
| | | | 1.8 | III domain | | | | |
| | | | blastx.14 | neural cell adhesion | gi\|1016012\| | 96% | 1 | 918 |
| | | | | protein BIG-2 precursor | gb\| | 68% | 960 | 1025 |
| | | | | [Rattus norvegicus] | AAC52262.1\| | 92% | 926 | 967 |
| | | | | | | 66% | 22 | 75 |
| | | | | | | 28% | 1 | 171 |
| | | | | | | 55% | 1 | 54 |
| | | | | | | 28% | 286 | 399 |
| | | | | | | 42% | 10 | 93 |
| | | | | | | 44% | 280 | 354 |
| | | | | | | 33% | 274 | 390 |
| | | | | | | 33% | 286 | 357 |
| | | | | | | 100% | 1028 | 1054 |
| | | | | | | 42% | 184 | 225 |
| | | | | | | 100% | 1057 | 1077 |
| | | | | | | 28% | 658 | 741 |
| HNTAF23 | 910947 | 49 | HMMER | PFAM: Fibronectin type | PF00041 | 15.99 | 174 | 242 |
| | | | 1.8 | III domain | | | | |
| | | | blastx.2 | hypothetical protein | pir\|T46428\| | 60% | 84 | 242 |
| | | | | DKFZp434B2226.1 - | T46428 | | | |
| | | | | human (fragment) | | | | |
| HNBUT01 | 1025375 | 50 | blastx.14 | (AL035632) | gi\|4481810\| | 69% | 192 | 425 |
| | | | | BACN32G11.d | emb\| | 36% | 687 | 743 |
| | | | | [Drosophila melanogaster] | CAB38462.1\| | | | |
| HNBUT01 | 913838 | 133 | HMMER | PFAM: GTPase of | PF01926 | 149.3 | 30 | 503 |
| | | | 2.1.1 | unknown function | | | | |
| | | | blastx.14 | (AL035632) | gi\|4481810\| | 71% | 30 | 506 |
| | | | | BACN32G11.d | emb\| | 36% | 768 | 824 |
| | | | | [Drosophila melanogaster] | CAB38462.1\| | | | |
| HEMFI21 | 1128266 | 51 | blastx.14 | (AF132148) unknown | gi\|4972682\| | 57% | 28 | 987 |
| | | | | [Drosophila melanogaster] | gb\| | 31% | 1321 | 1407 |
| | | | | | AAD34736.1\| | | | |
| | | | | | | 23% | 1240 | 1377 |
| | | | | | | 26% | 1315 | 1404 |
| | | | | | | 30% | 1264 | 1371 |
| | | | | | | 27% | 1288 | 1407 |
| | | | | | | 24% | 1309 | 1419 |
| | | | | | | 32% | 1282 | 1374 |
| | | | | | | 21% | 1309 | 1407 |
| | | | | | | 27% | 1430 | 1540 |
| HEMFI21 | 917436 | 134 | HMMER | PFAM: Cyclophilin type | PF00160 | 119.4 | 25 | 516 |
| | | | 2.1.1 | peptidyl-prolyl cis-trans | | | | |
| | | | | isomerase | | | | |
| | | | blastx.14 | (AF132148) unknown | gi\|4972682\| | 57% | 28 | 987 |
| | | | | [Drosophila melanogaster] | gb\| | 31% | 1321 | 1407 |
| | | | | | AAD34736.1\| | 23% | 1240 | 1377 |
| | | | | | | 26% | 1315 | 1404 |
| | | | | | | 30% | 1264 | 1371 |
| | | | | | | 27% | 1288 | 1407 |
| | | | | | | 24% | 1309 | 1419 |
| | | | | | | 32% | 1282 | 1374 |
| | | | | | | 21% | 1309 | 1407 |
| | | | | | | 27% | 1430 | 1540 |
| HMSOL52 | 921126 | 52 | HMMER | PFAM: EF hand | PF00036 | 12.43 | 276 | 359 |
| | | | 1.8 | | | | | |
| | | | blastx.2 | CG11041 PROTEIN. | sp\|Q9V8Z6\| | 45% | 102 | 464 |
| | | | | | Q9V8Z6 | | | |
| HHGAE47 | 922194 | 53 | HMMER | PFAM: EF hand | PF00036 | 16.77 | 171 | 257 |
| | | | 1.8 | | | | | |
| | | | blastx.2 | calmodulin [validated] - | pir\|S48728\| | 48% | 310 | 576 |
| | | | | human | MCHU | 48% | 138 | 260 |
| HMCGL45 | 922195 | 54 | HMMER | PFAM: EF hand | PF00036 | 26.6 | 460 | 546 |
| | | | 2.1.1 | | | | | |
| | | | blastx.2 | CALMODULIN. | sp\|Q9U6D3\| | 45% | 460 | 867 |
| | | | | | Q9U6D3 | | | |
| HEOQN14 | 923752 | 55 | HMMER | PFAM: GTPase of | PF01926 | 33.9 | 927 | 562 |
| | | | 2.1.1 | unknown function | | | | |
| | | | blastx.14 | (AC002510) unknown | gi\|2618702\| | 54% | 951 | 787 |
| | | | | protein [Arabidopsis | gb\| | | | |
| | | | | thaliana] | AAB84349.1\| | | | |
| HSOBC04 | 927280 | 56 | HMMER | PFAM: EF hand | PF00036 | 23.5 | 278 | 346 |
| | | | 2.1.1 | | | | | |
| | | | blastx.2 | hypothetical protein | pir\|T42709\| | 88% | 41 | 388 |
| | | | | DKFZp586I0821.1 - | T42709 | | | |
| | | | | human (fragment) | | | | |
| HTXKL86 | 1212283 | 57 | blastx.14 | CG17141 PROTEIN. | sp\|Q9VCU5\| | 49% | 448 | 885 |
| | | | | | Q9VCU5 | 56% | 208 | 324 |
| | | | | | | 51% | 325 | 405 |
| | | | | | | 48% | 985 | 1065 |
| | | | | | | 42% | 418 | 459 |
| HTXKL86 | 928194 | 135 | HMMER | PFAM: GTPase of | PF01926 | 133.3 | 10 | 636 |
| | | | 2.1.1 | unknown function | | | | |
| | | | blastx.14 | similar to hypothetical | gi\|2633977\| | 37% | 4 | 219 |
| | | | | proteins | emb\| | 33% | 493 | 690 |
| | | | | [Bacillus subtilis] | CAB13478.1\| | 54% | 334 | 405 |
| | | | | | | 31% | 229 | 285 |
| | | | | | | 30% | 355 | 444 |
| HUJCT05 | 1125408 | 58 | blastx.14 | (AF155116) NY-REN-60 | gi\|5360127\| | 100% | 380 | 117 |
| | | | | antigen [Homo sapiens] | gb\|AAD42882.1\| | | | |
| | | | | | AF155116 1 | | | |
| HUJCT05 | 929264 | 136 | HMMER | PFAM: EF hand | PF00036 | 11.52 | 359 | 433 |
| | | | 1.8 | | | | | |
| | | | blastx.2 | CG8334 PROTEIN | sp\|Q9VW49\| | 59% | 56 | 499 |
| | | | | (FRAGMENT). | Q9VW49 | | | |
| HBGMR22 | 1171965 | 59 | blastx.14 | MhpA [Escherichia coli] | gi\|1665746\| | 99% | 326 | 811 |
| | | | | | dbj\|BAA13052.1\| | | | |
| HBGMR22 | 933922 | 137 | HMMER | PFAM: FAD binding | PF01494 | 60.3 | 360 | 545 |
| | | | 2.1.1 | domain | | | | |
| | | | blastx.2 | probable monooxygenase | pir\|C64762\| | 98% | 309 | 542 |
| | | | | (EC 1.14.13.-) mphA - | C64762 | 85% | 568 | 627 |
| | | | | Escherichia coli | | 92% | 545 | 583 |
| HHFOC79 | 935406 | 60 | HMMER | PFAM: EF hand | PF00036 | 13.96 | 186 | 263 |
| | | | 1.8 | | | | | |
| | | | blastx.2 | EH domain containing 2. | sp\|AAF40470\| | 98% | 54 | 248 |
| | | | | | AAF40470 | | | |
| HMTBB17 | 950884 | 138 | HMMER | PFAM: EF hand | PF00036 | 15.74 | 285 | 202 |
| | | | 1.8 | | | | | |
| | | | blastx.2 | CDNA FLJ10466 FIS, | sp\|BAA91628\| | 100% | 513 | 100 |
| | | | | CLONE NT2RP1001665. | BAA91628 | | | |
| HKGDE58 | 945039 | 139 | blastx.2 | CDNA FLJ10466 FIS, | sp\|BAA91628\| | 86% | 17 | 835 |
| | | | | CLONE NT2RP1001665. | BAA91628 | 30% | 281 | 691 |
| | | | | | | 55% | 697 | 825 |
| | | | | | | 36% | 690 | 914 |
| | | | | | | 35% | 32 | 208 |
| HKGDE58 | 950885 | 140 | HMMER | PFAM: EF hand | PF00036 | 15.98 | 304 | 221 |
| | | | 1.8 | | | | | |
| | | | blastx.14 | (AJ133836) calmodulin 2 | gi\|4581211\| | 28% | 337 | 179 |
| | | | | [Branchiostoma floridae] | emb\| | 37% | 166 | 119 |
| | | | | | CAB40132.1\| | | | |
| HCHMW40 | 1129560 | 63 | blastx.14 | calmodulin [Plasmodium | gi\|385234\| | 60% | 377 | 565 |
| | | | | falciparum] | gb\| | 49% | 137 | 349 |
| | | | | | AAA29508.1\| | 38% | 350 | 574 |
| | | | | | | 36% | 158 | 346 |
| | | | | | | 32% | 482 | 565 |
| HCHMW40 | 951518 | 141 | HMMER | PFAM: EF hand | PF00036 | 129.9 | 486 | 572 |
| | | | 2.1.1 | | | | | |
| | | | blastx.2 | Calmodulin-like skin | sp\|AAF66821\| | 98% | 135 | 572 |
| | | | | protein. | AAF66821 | | | |
| HE8QZ34 | 1086807 | 64 | blastx.14 | predicted using | gi\|3875264\| | 50% | 438 | 596 |
| | | | | Genefinder; similar to EF | emb\| | 40% | 696 | 878 |
| | | | | hand (2 domains) | CAB01132.1\| | 32% | 228 | 413 |
| | | | | [Caenorhabditis elegans] | | | | |
| HE8QZ34 | 952283 | 142 | HMMER | PFAM: EF hand | PF00036 | 12.97 | 543 | 617 |
| | | | 1.8 | | | | | |
| | | | blastx.2 | CG4662 PROTEIN. | sp\|Q9VDT8\| | 38% | 249 | 980 |
| | | | | | Q9VDT8 | 42% | 249 | 878 |
| | | | | | | 33% | 977 | 1084 |
| HE8TM80 | 1185770 | 65 | blastx.14 | (AF191018) E2IG3 | gi\|6457340\| | 90% | 358 | 891 |
| | | | | [Homo sapiens] | gb\| | 98% | 970 | 1128 |
| | | | | | AAF09482.1\| | 97% | 1 | 117 |
| | | | | | AF191018_1 | 82% | 1318 | 1452 |
| | | | | | | 100% | 1260 | 1328 |
| | | | | | | 51% | 1080 | 1172 |
| | | | | | | 42% | 688 | 744 |
| HE8TM80 | 955022 | 143 | HMMER | PFAM: GTPase of | PF01926 | 51.1 | 460 | 624 |
| | | | 2.1.1 | unknown function | | | | |
| | | | blastx.14 | similar to GTP-binding | gi\|3878119\| | 59% | 463 | 624 |
| | | | | protein; cDNA EST 1 1 1 | emb\| | 55% | 4 | 90 |
| | | | | this gene | CAA88860.1 | | | |
| HHEFL55 | 957539 | 66 | HMMER | PFAM: Divalent cation | PF01769 | 41.7 | 419 | 610 |
| | | | 2.1.1 | transporter | | | | |
| | | | blastx.2 | (AK000480) unnamed | dbj\|BAA91192.1\| | 99% | 579 | 1283 |
| | | | | protein product [Homo | | 100% | 107 | 379 |
| | | | | sapiens] | | 74% | 488 | 628 |
| | | | | | | 28% | 603 | 803 |
| | | | | | | 34% | 398 | 484 |
| HWLEY40 | 1172021 | 67 | blastx.14 | similar to hypothetical | gi\|2633977\| | 43% | 183 | 422 |
| | | | | proteins [Bacillus | emb\| | 30% | 696 | 929 |
| | | | | subtilis] | CAB13478.1\| | 54% | 537 | 608 |
| HWLEY40 | 957875 | 144 | HMMER | PFAM: GTPase of | PF01926 | 103.9 | 192 | 632 |
| | | | 2.1.1 | unknown function | | | | |
| | | | blastx.14 | (AC002510) unknown | gi\|2618702\| | 54% | 1209 | 1373 |
| | | | | protein [Arabidopsis | gb\| | 50% | 168 | 347 |
| | | | | thaliana] | AAB84349.1\| | 70% | 516 | 575 |
| HHAWC08 | 957942 | 145 | HMMER | PFAM: IMP | PF00478 | 231.99 | 361 | 978 |
| | | | 1.8 | dehydrogenase/GMP | | | | |
| | | | | reductase | | | | |
| | | | blastx.2 | Guanosine | sp\|BAA93080\| | 100% | 334 | 975 |
| | | | | monophosphate reductase | BAA93080 | 100% | 975 | 1376 |
| | | | | isolog. | | | | |
| HCEHD66 | 959160 | 69 | HMMER | PFAM: EF hand | PF00036 | 64.2 | 311 | 397 |
| | | | 2.1.1 | | | | | |
| | | | blastx.2 | Neuronal calcium | sp\|AAD01642\| | 100% | 14 | 583 |
| | | | | sensor-1. | AAD01642 | | | |
| HMSGF27 | 962420 | 146 | HMMER | PFAM: Glycosyl | PF01532 | 38.1 | 198 | 323 |
| | | | 2.1.1 | hydrolase family 47 | | | | |
| | | | blastx.2 | CDNA FLJ10783 FIS, | sp\|BAA91806\| | 90% | 204 | 332 |
| | | | | CLONE NT2RP4000417, | BAA91806 | 34% | 76 | 204 |
| | | | | WEAKLY SIMILAR TO 1 | | | | |
| HBGMG39 | 971414 | 71 | HMMER | PFAM: EF hand | PF00036 | 10.69 | 61 | 141 |
| | | | 1.8 | | | | | |
| | | | blastx.2 | 45 KDA CALCIUM- | sp\|Q61112\| | 94% | 7 | 165 |
| | | | | BINDING PROTEIN | CB45_MOUSE | | | |
| | | | | PRECURSOR | | | | |
| | | | | (STROMAL 1 | | | | |
| HTTCT34 | 973210 | 147 | HMMER | PFAM: Divalent cation | PF01769 | 46.7 | 93 | 251 |
| | | | 2.1.1 | transporter | | | | |
| | | | blastx.2 | (AK000480) unnamed | dbj\|BAA91192.1\| | 89% | 466 | 972 |
| | | | | protein product [Homo | | 96% | 105 | 491 |
| | | | | sapiens] | | 58% | 861 | 1049 |
| HAWAM69 | 943104 | 73 | blastx.2 | SPARC-RELATED | sp\|Q9WVN9\| | 51% | 31 | 261 |
| | | | | PROTEIN. | Q9WVN9 | | | |
| HAWAM69 | 973465 | 148 | HMMER | PFAM: EF hand | PF00036 | •10.13 | 97 | 26 |
| | | | 1.8 | | | | | |
| | | | blastx.14 | (AF070470) SPARC- | gi\|5305327\| | 62% | 133 | 5 |
| | | | | related protein [Mus | gb\|AAD41590.1\| | | | |
| | | | | musculus] | AF070470_1 | | | |
| HMTAV95 | 614936 | 74 | HMMER | PFAM: Fibronectin type | PF00041 | 11.91 | 6 | 182 |
| | | | 1.8 | III domain | | | | |
| | | | blastx.2 | CG4668 PROTEIN. | sp\|Q9VJJ8\| | 37% | 6 | 281 |
| | | | | | Q9VJJ8 | 28% | 320 | 361 |
| HSXCB49 | 1172424 | 75 | blastx.14 | protein with the | gi\|491278\| | 60% | 447 | 373 |
| | | | | immunological activity of | emb\| | 75% | 365 | 318 |
| | | | | human 1 | CAA01010.1\| | 44% | 532 | 479 |
| HSXCB49 | 800501 | 149 | HMMER | PFAM: Interferon | PF00143 | 24.1 | 447 | 373 |
| | | | 2.1.1 | alpha/beta domain | | | | |
| HSXCB49 | 909820 | 150 | blastx.14 | IFN- | gi\|490347\| | 60% | 278 | 352 |
| | | | | omega1/alpha2(Bg1II) | emb\| | 55% | 65 | 145 |
| | | | | [synthetic construct] | CAA00297.1\| | 34% | 153 | 230 |
| | | | | | | 76% | 360 | 398 |
| | | | | | | 41% | 193 | 243 |
| HTEON29 | 1126522 | 76 | blastx.14 | (AB021866) CIB [Homo | gi\|4092850\| | 50% | 979 | 830 |
| | | | | sapiens] | dbj\| | 47% | 775 | 668 |
| | | | | | BAA36281.1\| | 57% | 1066 | 983 |
| | | | | | | 48% | 1168 | 1058 |
| HTEON29 | 815852 | 151 | HMMER | PFAM: EF hand | PF00036 | 22.29 | 266 | 349 |
| | | | 1.8 | | | | | |
| | | | blastx.2 | CALCIUM-AND | sp\|Q9R010\| | 41% | 2 | 496 |
| | | | | INTEGRIN-BINDING | Q9R010 | | | |
| | | | | PROTEIN CIB. | | | | |
| HHFGP83 | 828162 | 152 | HMMER | PFAM: Fibronectin type | PF00041 | 34.53 | 68 | 271 |
| | | | 1.8 | III domain | | | | |
| | | | blastx.2 | CDO protein - human | pir\|T03097\| | 68% | 68 | 265 |
| | | | | | T03097 | 55% | 258 | 317 |
| HTEKS20 | 1123458 | 78 | blastx.14 | calcineurin [Bos taurus] | gi\|312969\| | 77% | 1018 | 509 |
| | | | | | emb\|CAA50659.1\| | | | |
| HTEKS20 | 846714 | 153 | HMMER | PFAM: EF hand | PF00036 | 84.7 | 453 | 539 |
| | | | 2.1.1 | | | | | |
| | | | blastx.2 | calcineurin regulatory | pir\|A33391\| | 77% | 60 | 569 |
| | | | | chain - human | A33391 | | | |
| HCHAT01 | 867209 | 154 | HMMER | PFAM: EF hand | PF00036 | 24.01 | 1227 | 1304 |
| | | | 1.8 | | | | | |
| | | | blastx.2 | AD 3 (FRAGMENT). | sp\|Q9UQ32\| | 47% | 795 | 1409 |
| | | | | | Q9UQ32 | 72% | 14 | 367 |
| | | | | | | 57% | 472 | 783 |
| | | | | | | 79% | 375 | 476 |
| HAPNZ77 | 1171962 | 80 | blastx.14 | (AF051152) | gi\|3132528\| | 46% | 393 | 599 |
| | | | | Toll/interleukin-1 | gb\| | 33% | 576 | 701 |
| | | | | receptor-like protein 4 | AAC34377.1\| | 29% | 279 | 380 |
| | | | | [Homo sapiens] | | | | |
| HAPNZ77 | 887072 | 155 | HMMER | PFAM: TIR domain | PF01582 | 31.9 | 292 | 483 |
| | | | 2.1.1 | | | | | |
| HSIAO78 | 889498 | 156 | HMMER | PFAM: EF hand | PF00036 | 19.91 | 389 | 463 |
| | | | 1.8 | | | | | |
| | | | blastx.2 | HYPOTHETICAL 22.5 | sp\|O43745\| | 97% | 38 | 622 |
| | | | | KDA PROTEIN. | O43745 | | | |
| HWBEG18 | 909798 | 82 | HMMER | PFAM: EF hand | PF00036 | 33.3 | 505 | 591 |
| | | | 2.1.1 | | | | | |
| | | | blastx.2 | RAS ACTIVATOR | sp\|Q9UNN9\| | 55% | 103 | 684 |
| | | | | RASGRP. | Q9UNN9 | 71% | 698 | 889 |
| | | | | | | 48% | 2 | 142 |
| HFCBB56 | 1204322 | 83 | blastx.14 | inositol 1,4,5- | pir\|S62358\| | 44% | 269 | 376 |
| | | | | trisphosphate-binding | S62358 | 31% | 428 | 601 |
| | | | | protein, 130 K - rat | | 26% | 587 | 733 |
| HFCBB56 | 910073 | 157 | HMMER | PFAM: EF hand | PF00036 | 23.95 | 431 | 514 |
| | | | 1.8 | | | | | |
| | | | blastx.2 | 1-phosphatidylinositol- | pir\|S14113\| | 36% | 275 | 565 |
| | | | | 4,5-bisphosphate | S14113 | | | |
| | | | | phosphodiesterase 1 | | | | |
| HEMCL65 | 910900 | 84 | HMMER | PFAM: Fibronectin type | PF00041 | 22.41 | 93 | 278 |
| | | | 1.8 | III domain | | | | |
| | | | blastx.2 | ROUNDABOUT 1. | sp\|Q9Y6N7\| | 41% | 9 | 311 |
| | | | | | Q9Y6N7 | 47% | 311 | 373 |
| HMAMB94 | 910909 | 158 | HMMER | PFAM: Fibronectin type | PF00041 | 73.7 | 234 | 497 |
| | | | 2.1.1 | III domain | | | | |
| | | | blastx.2 | CG4668 PROTEIN. | sp\|Q9VJJ8\| | 36% | 45 | 551 |
| | | | | | Q9VJJ8 | 25% | 3 | 638 |
| | | | | | | 30% | 54 | 557 |
| | | | | | | 29% | 96 | 575 |
| HCQCI06 | 915000 | 86 | HMMER | PFAM: Fibronectin type | PF00041 | 24.42 | 6 | 191 |
| | | | 1.8 | III domain | | | | |
| | | | blastx.2 | hypothetical protein | pir\|T17344\| | 99% | 3 | 596 |
| | | | | DKFZp586L2024.1 - | T17344 | 100% | 593 | 646 |
| | | | | human (fragment) | | | | |
| HWLFG75 | 1227642 | 87 | blastx.14 | DJ63M2.4 (novel protein). | sp\|CAC08483\| | 83% | 457 | 846 |
| | | | | | CAC08483 | 92% | 847 | 1059 |
| | | | | | | 100% | 1125 | 1148 |
| HWLFG75 | 916563 | 159 | HMMER | PFAM: EF hand | PF00036 | 24.1 | 187 | 273 |
| | | | 2.1.1 | | | | | |
| | | | blastx.2 | DJ63M2.4 (novel protein). | sp\|CAC08483\| | 89% | 720 | 1058 |
| | | | | | CAC08483 | 75% | 457 | 717 |
| | | | | | | 100% | 1123 | 1146 |
| HBODA38 | 923456 | 88 | HMMER | PFAM: Fibronectin type | PF00041 | 31.21 | 418 | 648 |
| | | | 1.8 | III domain | | | | |
| | | | blastx.2 | Stretch response protein | sp\|CAC08495\| | 90% | 853 | 1470 |
| | | | | 553 (Fragment). | CAC08495 | | | |
| HCYBK19 | 1225324 | 89 | blastx.14 | hypothetical protein | pir\|T24812\| | 32% | 1744 | 1526 |
| | | | | T10H4.4 - Caenorhabditis | T24812 | 37% | 1951 | 1766 |
| | | | | elegans | | 26% | 1477 | 1343 |
| HCYBK19 | 925494 | 160 | HMMER | PFAM: Fibronectin type | PF00041 | 26.97 | 368 | 658 |
| | | | 1.8 | III domain | | | | |
| | | | blastx.2 | hypothetical protein | pir\|T23642\| | 32% | 596 | 1336 |
| | | | | M01B2.10 - | T23642 | | | |
| | | | | Caenorhabditis elegans | | | | |
| HWNCY05 | 1223031 | 90 | blastx.14 | GOK. | sp\|Q13586\| | 66% | 1190 | 237 |
| | | | | | Q13586 | | | |
| HWNCY05 | 928789 | 161 | HMMER | PFAM: EF hand | PF00036 | 12.55 | 18 | 101 |
| | | | 1.8 | | | | | |
| | | | blastx.2 | GOK. | sp\|Q13586\| | 60% | 6 | 1292 |
| | | | | | Q13586 | | | |
| HTXNN68 | 1143300 | 91 | blastx.14 | Containing ATP/GTP- | gi\|1504008\| | 100% | 516 | 1169 |
| | | | | binding site motif A(P- | dbj\| | 96% | 1 | 522 |
| | | | | loop): 1 alpha- | BAA13203.1\| | 29% | 304 | 396 |
| | | | | mannosidase(P1: B54407) | | | | |
| | | | | [Homo sapiens] | | | | |
| HTXNN68 | 933670 | 162 | HMMER | PFAM: Glycosyl | PF01532 | 540.8 | 1 | 906 |
| | | | 2.1.1 | hydrolase family 47 | | | | |
| | | | blastx.2 | hypothetical protein | pir\|T20009\| | 64% | 1 | 909 |
| | | | | C47E12.3 - | T20009 | | | |
| | | | | Caenorhabditis elegans | | | | |
| HWWFW06 | 933671 | 92 | HMMER | PFAM: Glycosyl | PF01532 | 159.3 | 78 | 320 |
| | | | 2.1.1 | hydrolase family 47 | | | | |
| | | | blastx.2 | hypothetical protein | pir\|T20009\| | 46% | 78 | 530 |
| | | | | C47E12.3 - | T20009 | | | |
| | | | | Caenorhabditis elegans | | | | |
| HOSDR06 | 1229558 | 93 | blastx.14 | hypothetical protein | pir\|T48940\| | 74% | 638 | 228 |
| | | | | F14L2.150 - Arabidopsis | T48940 | 40% | 1808 | 1359 |
| | | | | thaliana | | 56% | 1112 | 921 |
| | | | | | | 44% | 1325 | 1095 |
| | | | | | | 61% | 2026 | 1901 |
| | | | | | | 51% | 752 | 666 |
| | | | | | | 48% | 809 | 717 |
| | | | | | | 62% | 224 | 177 |
| | | | | | | 21% | 929 | 738 |
| | | | | | | 40% | 764 | 699 |
| HOSDR06 | 937599 | 163 | HMMER | PFAM: Peptidyl-prolyl | PF00160 | 216.99 | 808 | 1260 |
| | | | 1.8 | cis-trans isomerases | | | | |
| | | | blastx.14 | The ha1539 protein is | gi\|559713\| | 100% | 1 | 1260 |
| | | | | related to cyclophilin. | dbj\|BAA07555.1\| | | | |
| | | | | [Homo sapiens] | | | | |
| HNFHW14 | 939763 | 94 | HMMER | PFAM: Latrophilin/CL-1- | PF01825 | 35.1 | 44 | 196 |
| | | | 2.1.1 | like GPS domain | | | | |
| | | | blastx.2 | (AF166382) serpentine | gb\|AAF00617.1\| | 44% | 38 | 283 |
| | | | | receptor [Mus musculus] | AF166382_1 | | | |
| HSDHB12 | 941973 | 95 | HMMER | PFAM: Fibronectin type | PF00041 | 110.6 | 156 | 416 |
| | | | 2.1.1 | III domain | | | | |
| | | | blastx.2 | 165 K protein, skeletal | pir\|S43529\| | 49% | 15 | 635 |
| | | | | muscle - human | S43529 | 29% | 3 | 536 |
| | | | | | | 32% | 33 | 443 |
| | | | | | | 29% | 36 | 446 |
| | | | | | | 40% | 156 | 446 |
| HSDHB12 | 969094 | 164 | HMMER | PFAM: Fibronectin type | PF00041 | 14.26 | 15 | 65 |
| | | | 1.8 | III domain | | | | |
| | | | blastx.14 | 165 kD protein [Homo | gi\|407097\| | 48% | 15 | 278 |
| | | | | sapiens] | emb\|CAA48832.1\| | | | |
| HSDHB12 | 969097 | 165 | HMMER | PFAM: Fibronectin type | PF00041 | 110.6 | 691 | 431 |
| | | | 2.1.1 | III domain | | | | |
| | | | blastx.14 | 165 kD protein [Homo | gi\|407097\| | 49% | 754 | 212 |
| | | | | sapiens] | emb\|CAA48832.1\| | 34% | 691 | 401 |
| | | | | | | 32% | 691 | 419 |
| | | | | | | 30% | 592 | 404 |
| | | | | | | 50% | 508 | 401 |
| | | | | | | 50% | 691 | 596 |
| | | | | | | 78% | 206 | 165 |
| | | | | | | 45% | 691 | 620 |
| | | | | | | 47% | 136 | 68 |
| | | | | | | 40% | 92 | 27 |
| | | | | | | 32% | 221 | 147 |
| HTTJW49 | 948107 | 96 | HMMER | PFAM: EF hand | PF00036 | 11.98 | 283 | 348 |
| | | | 1.8 | | | | | |
| | | | blastx.2 | CITRIN. | sp\|Q9UNI7\| | 84% | 94 | 627 |
| | | | | | Q9UNI7 | | | |
| HELDR74 | 1218982 | 97 | blastx.14 | Toll/interleukin-1 receptor | sp\|AAF26200\| | 73% | 263 | 733 |
| | | | | 8. | AAF26200 | 77% | 830 | 1231 |
| HELDR74 | 963001 | 166 | HMMER | PFAM: TIR domain | PF01582 | 46.5 | 492 | 779 |
| | | | 2.1.1 | | | | | |
| | | | blastx.2 | (AF113795) | gb\|AAF26200.1\| | 74% | 201 | 1223 |
| | | | | toll/interleukin-1 receptor | AF113795_1 | | | |
| | | | | 8 [Mus musculus] | | | | |
| HOEET48 | 963290 | 98 | HMMER | PFAM: EF hand | PF00036 | 26 | 656 | 727 |
| | | | 2.1.1 | | | | | |
| | | | blastx.2 | Reticulocabin precursor. | sp\|AAG09692\| | 96% | 47 | 1030 |
| | | | | | AAG09692 | | | |
| HBODE51 | 1188998 | 99 | blastx.14 | aralar 1 [Homo sapiens] | gi\|3559910\| | 93% | 19 | 1152 |
| | | | | | emb\| | 86% | 1328 | 2050 |
| | | | | | CAA74834.11 | 100% | 1113 | 1325 |
| | | | | | | 26% | 1673 | 1831 |
| | | | | | | 30% | 1122 | 1238 |
| | | | | | | 27% | 1427 | 1663 |
| | | | | | | 41% | 1152 | 1244 |
| | | | | | | 58% | 1622 | 1657 |
| | | | | | | 38% | 1054 | 1116 |
| HBODE51 | 964235 | 167 | HMMER | PFAM: Mitochondrial | PF00153 | 235.26 | 995 | 1834 |
| | | | 1.8 | carrier proteins | | | | |
| | | | blastx.14 | aralar 1 [Homo sapiens] | gi\|3559910\| | 93% | 20 | 2053 |
| | | | | | emb\|CAA74834.1\| | | | |
| HE8UT58 | 973153 | 100 | HMMER | PFAM: Fibronectin type | PF00041 | 15.44 | 72 | 191 |
| | | | 1.8 | III domain | | | | |
| | | | blastx.2 | ASTROTACTIN2. | sp\|Q9QY74\| | 96% | 3 | 662 |
| | | | | | Q9QY74 | | | |
| HFXJI27 | 975381 | 168 | HMMER | PFAM: Fibronectin type | PF00041 | 22 | 21 | 110 |
| | | | 2.1.1 | III domain | | | | |
| HETHO38 | 552107 | 169 | HMMER | PFAM: Class I | PF00129 | 45.8 | 133 | 507 |
| | | | 1.8 | Histocompatibility | | | | |
| | | | | antigen, domains alpha 1 | | | | |
| | | | | and 2 | | | | |
| HTEIL07 | 953803 | 103 | HMMER | PFAM: EF hand | PF00036 | 11.27 | 192 | 263 |
| | | | 1.8 | | | | | |
| | | | blastx.2 | Hypothetical 41.3 kDa | sp\|CAB91065\| | 79% | 57 | 392 |
| | | | | protein. | CAB91065 | | | |
| HDPTC44 | 553453 | 104 | HMMER | PFAM: Class I | PF00129 | 138.61 | 130 | 438 |
| | | | 1.8 | Histocompatibility | | | | |
| | | | | antigen, domains alpha 1 | | | | |
| | | | | and 2 | | | | |
| HHPDE40 | 552112 | 105 | HMMER | PFAM: Class I | PF00129 | 42.2 | 147 | 347 |
| | | | 1.8 | Histocompatibility | | | | |
| | | | | antigen, domains alpha 1 | | | | |
| | | | | and 2 | | | | |
| HCESP56 | 827671 | 106 | HMMER | PFAM: EF hand | PF00036 | 11.86 | 240 | 317 |
| | | | 1.8 | | | | | |
| | | | blastx.2 | HYPOTHETICAL 27.4 | sp\|Q9UJF6\| | 100% | 186 | 452 |
| | | | | KDA PROTEIN | Q9UJF6 | | | |
| | | | | (FRAGMENT). | | | | |
| HHFGZ38 | 1117192 | 107 | blastx.14 | (AK001475) unnamed | gi\|7022755\| | 93% | 4 | 1335 |
| | | | | protein product [Homo | dbj\|BAA91712.1\| | | | |
| | | | | sapiens] | | | | |
| HHFGZ38 | 785591 | 170 | HMMER | PFAM: GTPase of | PF01926 | 97.2 | 338 | 799 |
| | | | 2.1.1 | unknown function | | | | |
| HAHEF22 | 910996 | 108 | HMMER | PFAM: Fibronectin type | PF00041 | 146.8 | 396 | 656 |
| | | | 2.1.1 | III domain | | | | |
| | | | blastx.2 | M-PROTEIN. | sp\|O55124\| | 43% | 3 | 803 |
| | | | | | O55124 | 28% | 3 | 779 |
| | | | | | | 25% | 90 | 683 |
| | | | | | | 40% | 396 | 686 |
| | | | | | | 29% | 306 | 686 |
| | | | | | | 31% | 3 | 365 |
| HCUEV29 | 816065 | 109 | HMMER | PFAM: EF hand | PF00036 | 31.87 | 143 | 229 |
| | | | 1.8 | | | | | |
| | | | blastx.2 | CG10641 PROTEIN. | sp\|Q9VJ26\| | 59% | 89 | 286 |
| | | | | | Q9VJ26 | 49% | 312 | 500 |
| HBGQN46 | 945370 | 110 | HMMER | PFAM: Fibronectin type | PF00041 | 11 | 171 | 314 |
| | | | 1.8 | III domain | | | | |
| HMQCE42 | 806815 | 111 | HMMER | PFAM: Class I | PF00129 | 18.32 | 112 | 153 |
| | | | 1.8 | Histocompatibility | | | | |
| | | | | antigen, domains | | | | |
| | | | | alpha 1 and 2 | | | | |
| HEQAY32 | 869178 | 171 | HMMER | PFAM: Fibronectin | PF00041 | 12.25 | 736 | 867 |
| | | | 1.8 | type III domain | | | | |
| HOEFI09 | 974194 | 113 | HMMER | PFAM: Class I | PF00129 | 43.51 | 203 | 439 |
| | | | 1.8 | Histocompatibility | | | | |
| | | | | antigen, domains | | | | |
| | | | | alpha 1 and 2 | | | | |
| HSDGJ23 | 1182294 | 114 | blastx.14 | DNA-damage- | gi\|146611\| | 89% | 68 | 745 |
| | | | | inducible protein | gb\|AAA24069.1\| | | | |
| | | | | [Escherichia coli] | | | | |
| HSDGJ23 | 714160 | 172 | HMMER | PFAM: | PF01554 | 45.1 | 229 | 405 |
| | | | 2.1.1 | Uncharacterized | | | | |
| | | | | membrane protein | | | | |
| | | | | family | | | | |
| | | | blastx.2 | DNA-damage- | pir\|C65212\| | 81% | 68 | 232 |
| | | | | inducible protein f - | C65212 | 97% | 280 | 405 |
| | | | | Escherichia coli | | | | |
| | | | | (strain K-12) | | | | |
| HCEOR02 | 921110 | 173 | HMMER | PFAM: Fibronectin | PF00041 | 14.8 | 149 | 373 |
| | | | 1.8 | type III domain | | | | |
| HLTEH39 | 943641 | 116 | HMMER | PFAM: Class I | PF00129 | 132.16 | 2 | 178 |
| | | | 1.8 | Histocompatibility | | | | |
| | | | | antigen, domains | | | | |
| | | | | alpha 1 and 2 | | | | |
| HRODF07 | 952426 | 174 | HMMER | PFAM: Fibronectin | PF00041 | 16.63 | 82 | 192 |
| | | | 1.8 | type III domain | | | | |

[0049] Table 2 further characterizes certain encoded polypeptides of the invention, by providing the results of comparisons to protein and protein family databases. The first column provides a unique clone identifier, “Clone ID NO:”, corresponding to a cDNA clone disclosed in Table 1A. The second column provides the unique contig identifier, “Contig ID:” which allows correlation with the information in Table 1A. The third column provides the sequence identifier, “SEQ ID NO:”, for the contig polynucleotide sequences. The fourth column provides the analysis method by which the homology/identity disclosed in the Table was determined. The fifth column provides a description of the PFAM/NR hit identified by each analysis. Column six provides the accession number of the PFAM/NR hit disclosed in the fifth column. Column seven, score/percent identity, provides a quality score or the percent identity, of the hit disclosed in column five. Comparisons were made between polypeptides encoded by polynucleotides of the invention and a non-redundant protein database (herein referred to as “NR”), or a database of protein families (herein referred to as “PFAM”), as described below.

[0050] The NR database, which comprises the NBRF PIR database, the NCBI GenPept database, and the SIB SwissProt and TrEMBL databases, was made non-redundant using the computer program nrdb2 (Warren Gish, Washington University in Saint Louis). Each of the polynucleotides shown in Table 1A, column 3 (e.g., SEQ ID NO:X or the ‘Query’ sequence) was used to search against the NR database. The computer program BLASTX was used to compare a 6-frame translation of the Query sequence to the NR database (for information about the BLASTX algorithm please see Altshul et al., J. Mol. Biol. 215:403-410 (1990); and Gish and States, Nat. Genet. 3:266-272 (1993). A description of the sequence that is most similar to the Query sequence (the highest scoring ‘Subject’) is shown in column five of Table 2 and the database accession number for that sequence is provided in column six. The highest scoring ‘Subject’ is reported in Table 2 if (a) the estimated probability that the match occurred by chance alone is less than 1.0e-07, and (b) the match was not to a known repetitive element. BLASTX returns alignments of short polypeptide segments of the Query and Subject sequences which share a high degree of similarity; these segments are known as High-Scoring Segment Pairs or HSPs. Table 2 reports the degree of similarity between the Query and the Subject for each HSP as a percent identity in Column 7. The percent identity is determined by dividing the number of exact matches between the two aligned sequences in the HSP, dividing by the number of Query amino acids in the HSP and multiplying by 100. The polynucleotides of SEQ ID NO:X which encode the polypeptide sequence that generates an HSP are delineated by columns 8 and 9 of Table 2.

[0051] The PFAM database, PFAM version 2.1, (Sonnhammer et al., Nucl. Acids Res., 26:320-322, 1998)) consists of a series of multiple sequence alignments; one alignment for each protein family. Each multiple sequence alignment is converted into a probability model called a Hidden Markov Model, or HMM, that represents the position-specific variation among the sequences that make up the multiple sequence alignment (see, e.g., Durbin et al., Biological sequence analysis: probabilistic models of proteins and nucleic acids, Cambridge University Press, 1998 for the theory of HMMs). The program HMMER version 1.8 (Sean Eddy, Washington University in Saint Louis) was used to compare the predicted protein sequence for each Query sequence (SEQ ID NO:Y in Table 1A) to each of the HMMs derived from PFAM version 2.1. A HMM derived from PFAM version 2.1 was said to be a significant match to a polypeptide of the invention if the score returned by HMMER 1.8 was greater than 0.8 times the HMMER 1.8 score obtained with the most distantly related known member of that protein family. The description of the PFAM family which shares a significant match with a polypeptide of the invention is listed in column 5 of Table 2, and the database accession number of the PFAM hit is provided in column 6. Column 7 provides the score returned by HMMER version 1.8 for the alignment. Columns 8 and 9 delineate the polynucleotides of SEQ ID NO:X which encode the polypeptide sequence which show a significant match to a PFAM protein family.

[0052] As mentioned, columns 8 and 9 in Table 2, “NT From” and “NT To”, delineate the polynucleotides of “SEQ ID NO:X” that encode a polypeptide having a significant match to the PFAM/NR database as disclosed in the fifth column. In one embodiment, the invention provides a protein comprising, or alternatively consisting of, a polypeptide encoded by the polynucleotides of SEQ ID NO:X delineated in columns 8 and 9 of Table 2. Also provided are polynucleotides encoding such proteins, and the complementary strand thereto.

[0053] The nucleotide sequence SEQ ID NO:X and the translated SEQ ID NO:Y are sufficiently accurate and otherwise suitable for a variety of uses well known in the art and described further below. For instance, the nucleotide sequences of SEQ ID NO:X are useful for designing nucleic acid hybridization probes that will detect nucleic acid sequences contained in SEQ ID NO:X or the cDNA contained in Clone ID NO:Z. These probes will also hybridize to nucleic acid molecules in biological samples, thereby enabling immediate applications in chromosome mapping, linkage analysis, tissue identification and/or typing, and a variety of forensic and diagnostic methods of the invention. Similarly, polypeptides identified from SEQ ID NO:Y may be used to generate antibodies which bind specifically to these polypeptides, or fragments thereof, and/or to the polypeptides encoded by the cDNA clones identified in, for example, Table 1A.

[0054] Nevertheless, DNA sequences generated by sequencing reactions can contain sequencing errors. The errors exist as misidentified nucleotides, or as insertions or deletions of nucleotides in the generated DNA sequence. The erroneously inserted or deleted nucleotides cause frame shifts in the reading frames of the predicted amino acid sequence. In these cases, the predicted amino acid sequence diverges from the actual amino acid sequence, even though the generated DNA sequence may be greater than 99.9% identical to the actual DNA sequence (for example, one base insertion or deletion in an open reading frame of over 1000 bases).

[0055] Accordingly, for those applications requiring precision in the nucleotide sequence or the amino acid sequence, the present invention provides not only the generated nucleotide sequence identified as SEQ ID NO:X, and a predicted translated amino acid sequence identified as SEQ ID NO:Y, but also a sample of plasmid DNA containing cDNA Clone ID NO:Z (deposited with the ATCC on Oct. 5, 2000, and receiving ATCC designation numbers PTA 2574 and PTA 2575; deposited with the ATCC on Jan. 5, 2001, and having depositor reference numbers TS-1, TS-2, AC-1, and AC-2; and/or as set forth, for example, in Table 1A, 6 and 7). The nucleotide sequence of each deposited clone can readily be determined by sequencing the deposited clone in accordance with known methods. Further, techniques known in the art can be used to verify the nucleotide sequences of SEQ ID NO:X.

[0056] The predicted amino acid sequence can then be verified from such deposits. Moreover, the amino acid sequence of the protein encoded by a particular clone can also be directly determined by peptide sequencing or by expressing the protein in a suitable host cell containing the deposited human cDNA, collecting the protein, and determining its sequence.

[0057] RACE Protocol for Recovery of Full-Length Genes

[0058] Partial cDNA clones can be made full-length by utilizing the rapid amplification of cDNA ends (RACE) procedure described in Frohman, M. A., et al., Proc. Nat'l. Acad. Sci. USA, 85:8998-9002 (1988). A cDNA clone missing either the 5′ or 3′ end can be reconstructed to include the absent base pairs extending to the translational start or stop codon, respectively. In some cases, cDNAs are missing the start codon of translation, therefor. The following briefly describes a modification of this original 5′ RACE procedure. Poly A+ or total RNA is reverse transcribed with Superscript II (Gibco/BRL) and an antisense or complementary primer specific to the cDNA sequence. The primer is removed from the reaction with a Microcon Concentrator (Amicon). The first-strand cDNA is then tailed with dATP and terminal deoxynucleotide transferase (Gibco/BRL). Thus, an anchor sequence is produced which is needed for PCR amplification. The second strand is synthesized from the dA-tail in PCR buffer, Taq DNA polymerase (Perkin-Elmer Cetus), an oligo-dT primer containing three adjacent restriction sites (XhoI, SalI and ClaI) at the 5′ end and a primer containing just these restriction sites. This double-stranded cDNA is PCR amplified for 40 cycles with the same primers as well as a nested cDNA-specific antisense primer. The PCR products are size-separated on an ethidium bromide-agarose gel and the region of gel containing cDNA products the predicted size of missing protein-coding DNA is removed. cDNA is purified from the agarose with the Magic PCR Prep kit (Promega), restriction digested with XhoI or SalI, and ligated to a plasmid such as pBluescript SKII (Stratagene) at XhoI and EcoRV sites. This DNA is transformed into bacteria and the plasmid clones sequenced to identify the correct protein-coding inserts. Correct 5′ ends are confirmed by comparing this sequence with the putatively identified homologue and overlap with the partial cDNA clone. Similar methods known in the art and/or commercial kits are used to amplify and recover 3′ ends.

[0059] Several quality-controlled kits are commercially available for purchase. Similar reagents and methods to those above are supplied in kit form from Gibco/BRL for both 5′ and 3′ RACE for recovery of full length genes. A second kit is available from Clontech which is a modification of a related technique, SLIC (single-stranded ligation to single-stranded cDNA), developed by Dumas et al., Nucleic Acids Res., 19:5227-32 (1991). The major differences in procedure are that the RNA is alkaline hydrolyzed after reverse transcription and RNA ligase is used to join a restriction site-containing anchor primer to the first-strand cDNA. This obviates the necessity for the dA-tailing reaction which results in a polyT stretch that is difficult to sequence past.

[0060] An alternative to generating 5′ or 3′ cDNA from RNA is to use cDNA library double-stranded DNA. An asymmetric PCR-amplified antisense cDNA strand is synthesized with an antisense cDNA-specific primer and a plasmid-anchored primer. These primers are removed and a symmetric PCR reaction is performed with a nested cDNA-specific antisense primer and the plasmid-anchored primer.

[0061] RNA Ligase Protocol For Generating The 5′ or 3′ End Sequences to Obtain Full Length Genes

[0062] Once a gene of interest is identified, several methods are available for the identification of the 5′ or 3′ portions of the gene which may not be present in the original cDNA plasmid. These methods include, but are not limited to, filter probing, clone enrichment using specific probes and protocols similar and identical to 5′ and 3′ RACE. While the full length gene may be present in the library and can be identified by probing, a useful method for generating the 5′ or 3′ end is to use the existing sequence information from the original cDNA to generate the missing information. A method similar to 5′ RACE is available for generating the missing 5′ end of a desired full-length gene. (This method was published by Fromont-Racine et al., Nucleic Acids Res., 21(7):1683-1684 (1993)). Briefly, a specific RNA oligonucleotide is ligated to the 5′ ends of a population of RNA presumably containing full-length gene RNA transcript and a primer set containing a primer specific to the ligated RNA oligonucleotide and a primer specific to a known sequence of the gene of interest, is used to PCR amplify the 5′ portion of the desired full length gene which may then be sequenced and used to generate the full length gene. This method starts with total RNA isolated from the desired source, poly A RNA may be used but is not a prerequisite for this procedure. The RNA preparation may then be treated with phosphatase if necessary to eliminate 5′ phosphate groups on degraded or damaged RNA which may interfere with the later RNA ligase step. The phosphatase if used is then inactivated and the RNA is treated with tobacco acid pyrophosphatase in order to remove the cap structure present at the 5′ ends of messenger RNAs. This reaction leaves a 5′ phosphate group at the 5′ end of the cap cleaved RNA which can then be ligated to an RNA oligonucleotide using T4 RNA ligase. This modified RNA preparation can then be used as a template for first strand cDNA synthesis using a gene specific oligonucleotide. The first strand synthesis—reaction can then be used as a template for PCR amplification of the desired 5′ end using a primer specific to the ligated RNA oligonucleotide and a primer specific to the known sequence of the gene of interest. The resultant product is then sequenced and analyzed to confirm that the 5′ end sequence belongs to the relevant gene.

[0063] The present invention also relates to vectors or plasmids which include such DNA sequences, as well as the use of the DNA sequences. The material deposited with the ATCC (deposited with the ATCC on Oct. 5, 2000, and receiving ATCC designation numbers PTA 2574 and PTA 2575; deposited with the ATCC on Jan. 5, 2001, and receiving ATCC designation numbers TS-1, TS-2, AC-1, and AC-2; and/or as set forth, for example, in Table 1A, Table 6, or Table 7) is a mixture of cDNA clones derived from a variety of human tissue and cloned in either a plasmid vector or a phage vector, as described, for example, in Table 7. These deposits are referred to as “the deposits” herein. The tissues from which some of the clones were derived are listed in Table 7, and the vector in which the corresponding cDNA is contained is also indicated in Table 7. The deposited material includes cDNA clones corresponding to SEQ ID NO:X described, for example, in Table 1A (Clone ID NO:Z). A clone which is isolatable from the ATCC Deposits by use of a sequence listed as SEQ ID NO:X, may include the entire coding region of a human gene or in other cases such clone may include a substantial portion of the coding region of a human gene. Furthermore, although the sequence listing may in some instances list only a portion of the DNA sequence in a clone included in the ATCC Deposits, it is well within the ability of one skilled in the art to sequence the DNA included in a clone contained in the ATCC Deposits by use of a sequence (or portion thereof) described in, for example Tables 1A or 2 by procedures hereinafter further described, and others apparent to those skilled in the art.

[0064] Also provided in Table 7 is the name of the vector which contains the cDNA clone. Each vector is routinely used in the art. The following additional information is provided for convenience.

[0065] Vectors Lambda Zap (U.S. Pat. Nos. 5,128,256 and 5,286,636), Uni-Zap XR (U.S. Pat. Nos. 5,128, 256 and 5,286,636), Zap Express (U.S. Pat. Nos. 5,128,256 and 5,286,636), pBluescript (pBS) (Short, J. M. et al., Nucleic Acids Res. 16:7583-7600 (1988); Alting-Mees, M. A. and Short, J. M., Nucleic Acids Res. 17:9494 (1989)) and pBK (Alting-Mees, M. A. et al., Strategies 5.58-61 (1992)) are commercially available from Stratagene Cloning Systems, Inc., 11011 N. Torrey Pines Road, La Jolla, Calif., 92037. pBS contains an ampicillin resistance gene and pBK contains a neomycin resistance gene. Phagemid pBS may be excised from the Lambda Zap and Uni-Zap XR vectors, and phagemid pBK may be excised from the Zap Express vector. Both phagemids may be transformed into E. coli strain XL-1 Blue, also available from Stratagene.

[0066] Vectors pSport1, pCMVSport 1.0, pCMVSport 2.0 and pCMVSport 3.0, were obtained from Life Technologies, Inc., P. O. Box 6009, Gaithersburg, Md. 20897. All Sport vectors contain an ampicillin resistance gene and may be transformed into E. coli strain DH10B, also available from Life Technologies. See, for instance, Gruber, C. E., et al., Focus 15:59—(1993). Vector lafmid BA (Bento Soares, Columbia University, New York, N.Y.) contains an ampicillin resistance gene and can be transformed into E. coli strain XL-1 Blue. Vector pCR®2.1, which is available from Invitrogen, 1600 Faraday Avenue, Carlsbad, Calif. 92008, contains an ampicillin resistance gene and may be transformed into E. coli strain DH10B, available from Life Technologies. See, for instance, Clark, J. M., Nuc. Acids Res. 16:9677-9686 (1988) and Mead, D. et al., Bio/Technology 9: (1991).

[0067] The present invention also relates to the genes corresponding to SEQ ID NO:X, SEQ ID NO:Y, and/or the deposited clone (Clone ID NO:Z). The corresponding gene can be isolated in accordance with known methods using the sequence information disclosed herein. Such methods include preparing probes or primers from the disclosed sequence and identifying or amplifying the corresponding gene from appropriate sources of genomic material.

[0068] Also provided in the present invention are allelic variants, orthologs, and/or species homologs. Procedures known in the art can be used to obtain full-length genes, allelic variants, splice variants, full-length coding portions, orthologs, and/or species homologs of genes corresponding to SEQ ID NO:X or the complement thereof, polypeptides encoded by genes corresponding to SEQ ID NO:X or the complement thereof, and/or the cDNA contained in Clone ID NO:Z, using information from the sequences disclosed herein or the clones deposited with the ATCC. For example, allelic variants and/or species homologs may be isolated and identified by making suitable probes or primers from the sequences provided herein and screening a suitable nucleic acid source for allelic variants and/or the desired homologue.

[0069] The polypeptides of the invention can be prepared in any suitable manner. Such polypeptides include isolated naturally occurring polypeptides, recombinantly produced polypeptides, synthetically produced polypeptides, or polypeptides produced by a combination of these methods. Means for preparing such polypeptides are well understood in the art.

[0070] The polypeptides may be in the form of the secreted protein, including the mature form, or may be a part of a larger protein, such as a fusion protein (see below). It is often advantageous to include an additional amino acid sequence which contains secretory or leader sequences, pro-sequences, sequences which aid in purification, such as multiple histidine residues, or an additional sequence for stability during recombinant production.

[0071] The polypeptides of the present invention are preferably provided in an isolated form, and preferably are substantially purified. A recombinantly produced version of a polypeptide, including the secreted polypeptide, can be substantially purified using techniques described herein or otherwise known in the art, such as, for example, by the one-step method described in Smith and Johnson, Gene 67:31-40 (1988). Polypeptides of the invention also can be purified from natural, synthetic or recombinant sources using techniques described herein or otherwise known in the art, such as, for example, antibodies of the invention raised against the polypeptides of the present invention in methods which are well known in the art.

[0072] The present invention provides a polynucleotide comprising, or alternatively consisting of, the nucleic acid sequence of SEQ ID NO:X, and/or the cDNA sequence contained in Clone ID NO:Z. The present invention also provides a polypeptide comprising, or alternatively, consisting of, the polypeptide sequence of SEQ ID NO:Y, a polypeptide encoded by SEQ ID NO:X or a complement thereof, a polypeptide encoded by the cDNA contained in Clone ID NO:Z, and/or the polypeptide sequence encoded by a nucleotide sequence in SEQ ID NO:B as defined in column 6 of Table 1 B. Polynucleotides encoding a polypeptide comprising, or alternatively consisting of the polypeptide sequence of SEQ ID NO:Y, a polypeptide encoded by SEQ ID NO:X, a polypeptide encoded by the cDNA contained in Clone ID NO:Z, and/or a polypeptide sequence encoded by a nucleotide sequence in SEQ ID NO:B as defined in column 6 of Table 1B are also encompassed by the invention. The present invention further encompasses a polynucleotide comprising, or alternatively consisting of, the complement of the nucleic acid sequence of SEQ ID NO:X, a nucleic acid sequence encoding a polypeptide encoded by the complement of the nucleic acid sequence of SEQ ID NO:X, and/or the cDNA contained in Clone ID NO:Z.

[0073] Moreover, representative examples of polynucleotides of the invention comprise, or alternatively consist of, one, two, three, four, five, six, seven, eight, nine, ten, or more of the sequences delineated in Table 1B column 6, or any combination thereof. Additional, representative examples of polynucleotides of the invention comprise, or alternatively consist of, one, two, three, four, five, six, seven, eight, nine, ten, or more of the complementary strand(s) of the sequences delineated in Table 1B column 6, or any combination thereof. In further embodiments, the above-described polynucleotides of the invention comprise, or alternatively consist of, sequences delineated in Table 1B, column 6, and have a nucleic acid sequence which is different from that of the BAC fragment having the sequence disclosed in SEQ ID NO:B (see Table 1B, column 5). In additional embodiments, the above-described polynucleotides of the invention comprise, or alternatively consist of, sequences delineated in Table 1B, column 6, and have a nucleic acid sequence which is different from that published for the BAC clone identified as BAC ID NO:A (see Table 1B, column 4). In additional embodiments, the above-described polynucleotides of the invention comprise, or alternatively consist of, sequences delineated in Table 1B, column 6, and have a nucleic acid sequence which is different from that contained in the BAC clone identified as BAC ID NO:A (see Table 1B, column 4). Polypeptides encoded by these polynucleotides, other polynucleotides that encode these polypeptides, and antibodies that bind these polypeptides are also encompassed by the invention. Additionally, fragments and variants of the above-described polynucleotides and polypeptides are also encompassed by the invention.

[0074] Further, representative examples of polynucleotides of the invention comprise, or alternatively consist of, one, two, three, four, five, six, seven, eight, nine, ten, or more of the sequences delineated in column 6 of Table 1B which correspond to the same Clone ID NO:Z (see Table 1B, column 1), or any combination thereof. Additional, representative examples of polynucleotides of the invention comprise, or alternatively consist of, one, two, three, four, five, six, seven, eight, nine, ten, or more of the complementary strand(s) of the sequences delineated in column 6 of Table 1B which correspond to the same Clone ID NO:Z (see Table 1B, column 1), or any combination thereof. In further embodiments, the above-described polynucleotides of the invention comprise, or alternatively consist of, sequences delineated in column 6 of Table 1B which correspond to the same Clone ID NO:Z (see Table 1B, column 1) and have a nucleic acid sequence which is different from that of the BAC fragment having the sequence disclosed in SEQ ID NO:B (see Table 1B, column 5). In additional embodiments, the above-described polynucleotides of the invention comprise, or alternatively consist of, sequences delineated in column 6 of Table 1B which correspond to the same Clone ID NO:Z (see Table 1B, column 1) and have a nucleic acid sequence which is different from that published for the BAC clone identified as BAC ID NO:A (see Table 1B, column 4). In additional embodiments, the above-described polynucleotides of the invention comprise, or alternatively consist of, sequences delineated in column 6 of Table 1B which correspond to the same Clone ID NO:Z (see Table 1B, column 1) and have a nucleic acid sequence which is different from that contained in the BAC clone identified as BAC ID NO:A (see Table 1B, column 4). Polypeptides encoded by these polynucleotides, other polynucleotides that encode these polypeptides, and antibodies that bind these polypeptides are also encompassed by the invention. Additionally, fragments and variants of the above-described polynucleotides and polypeptides are also encompassed by the invention.

[0075] Further, representative examples of polynucleotides of the invention comprise, or alternatively consist of, one, two, three, four, five, six, seven, eight, nine, ten, or more of the sequences delineated in column 6 of Table 1B which correspond to the same contig sequence identifer SEQ ID NO:X (see Table 1B, column 2), or any combination thereof. Additional, representative examples of polynucleotides of the invention comprise, or alternatively consist of, one, two, three, four, five, six, seven, eight, nine, ten, or more of the complementary strand(s) of the sequences delineated in column 6 of Table 1B which correspond to the same contig sequence identifer SEQ ID NO:X (see Table 1B, column 2), or any combination thereof. In further embodiments, the above-described polynucleotides of the invention comprise, or alternatively consist of, sequences delineated in column 6 of Table 1B which correspond to the same contig sequence identifer SEQ ID NO:X (see Table 1B, column 2) and have a nucleic acid sequence which is different from that of the BAC fragment having the sequence disclosed in SEQ ID NO:B (see Table 1B, column 5). In additional embodiments, the above-described polynucleotides of the invention comprise, or alternatively consist of, sequences delineated in column 6 of Table 1B which correspond to the same contig sequence identifer SEQ ID NO:X (see Table 1B, column 2) and have a nucleic acid sequence which is different from that published for the BAC clone identified as BAC ID NO:A (see Table 1B, column 4). In additional embodiments, the above-described polynucleotides of the invention comprise, or alternatively consist of, sequences delineated in column 6 of Table 1B which correspond to the same contig sequence identifer SEQ ID NO:X (see Table 1B, column 2) and have a nucleic acid sequence which is different from that contained in the BAC clone identified as BAC ID NO:A (See Table 1B, column 4). Polypeptides encoded by these polynucleotides, other polynucleotides that encode these polypeptides, and antibodies that bind these polypeptides are also encompassed by the invention. Additionally, fragments and variants of the above-described polynucleotides and polypeptides are also encompassed by the invention.

[0076] Moreover, representative examples of polynucleotides of the invention comprise, or alternatively consist of, one, two, three, four, five, six, seven, eight, nine, ten, or more of the sequences delineated in the same row of Table 1B column 6, or any combination thereof. Additional, representative examples of polynucleotides of the invention comprise, or alternatively consist of, one, two, three, four, five, six, seven, eight, nine, ten, or more of the complementary strand(s) of the sequences delineated in the same row of Table 1B column 6, or any combination thereof. In preferred embodiments, the polynucleotides of the invention comprise, or alternatively consist of, one, two, three, four, five, six, seven, eight, nine, ten, or more of the complementary strand(s) of the sequences delineated in the same row of Table 1B column 6, wherein sequentially delineated sequences in the table (i.e. corresponding to those exons located closest to each other) are directly contiguous in a 5′ to 3′ orientation. In further embodiments, above-described polynucleotides of the invention comprise, or alternatively consist of, sequences delineated in the same row of Table 1B, column 6, and have a nucleic acid sequence which is different from that of the BAC fragment having the sequence disclosed in SEQ ID NO:B (see Table 1B, column 5). In additional embodiments, the above-described polynucleotides of the invention comprise, or alternatively consist of, sequences delineated in the same row of Table 1B, column 6, and have a nucleic acid sequence which is different from that published for the BAC clone identified as BAC ID NO:A (see Table 1B, column 4). In additional embodiments, the above-described polynucleotides of the invention comprise, or alternatively consist of, sequences delineated in the same row of Table 1B, column 6, and have a nucleic acid sequence which is different from that contained in the BAC clone identified as BAC ID NO:A (see Table 1B, column 4). Polypeptides encoded by these polynucleotides, other polynucleotides that encode these polypeptides, and antibodies that bind these polypeptides are also encompassed by the invention.

[0077] In additional specific embodiments, polynucleotides of the invention comprise, or alternatively consist of, one, two, three, four, five, six, seven, eight, nine, ten, or more of the sequences delineated in column 6 of Table 1B, and the polynucleotide sequence of SEQ ID NO:X (e.g., as defined in Table 1B, column 2) or fragments or variants thereof. Polypeptides encoded by these polynucleotides, other polynucleotides that encode these polypeptides, and antibodies that bind these polypeptides are also encompassed by the invention.

[0078] In additional specific embodiments, polynucleotides of the invention comprise, or alternatively consist of, one, two, three, four, five, six, seven, eight, nine, ten, or more of the sequences delineated in column 6 of Table 1B which correspond to the same Clone ID NO:Z (see Table 1B, column 1), and the polynucleotide sequence of SEQ ID NO:X (e.g., as defined in Table 1A or 1B) or fragments or variants thereof. In preferred embodiments, the delineated sequence(s) and polynucleotide sequence of SEQ ID NO:X correspond to the same Clone ID NO:Z. Polypeptides encoded by these polynucleotides, other polynucleotides that encode these polypeptides, and antibodies that bind these polypeptides are also encompassed by the invention.

[0079] In further specific embodiments, polynucleotides of the invention comprise, or alternatively consist of, one, two, three, four, five, six, seven, eight, nine, ten, or more of the sequences delineated in the same row of column 6 of Table 1B, and the polynucleotide sequence of SEQ ID NO:X (e.g., as defined in Table 1A or 1B) or fragments or variants thereof. In preferred embodiments, the delineated sequence(s) and polynucleotide sequence of SEQ ID NO:X correspond to the same row of column 6 of Table 1B. Polypeptides encoded by these polynucleotides, other polynucleotides that encode these polypeptides, and antibodies that bind these polypeptides are also encompassed by the invention.

[0080] In additional specific embodiments, polynucleotides of the invention comprise, or alternatively consist of a polynucleotide sequence in which the 3′ 10 polynucleotides of one of the sequences delineated in column 6 of Table 1B and the 5′ 10 polynucleotides of the sequence of SEQ ID NO:X are directly contiguous. Nucleic acids which hybridize to the complement of these 20 contiguous polynucleotides under stringent hybridization conditions or alternatively, under lower stringency conditions, are also encompassed by the invention. Polypeptides encoded by these polynucleotides and/or nucleic acids, other polynucleotides and/or nucleic acids that encode these polypeptides, and antibodies that bind these polypeptides are also encompassed by the invention. Additionally, fragments and variants of the above-described polynucleotides, nucleic acids, and polypeptides are also encompassed by the invention.

[0081] In additional specific embodiments, polynucleotides of the invention comprise, or alternatively consist of, a polynucleotide sequence in which the 3′ 10 polynucleotides of one of the sequences delineated in column 6 of Table 1B and the 5′ 10 polynucleotides of a fragment or variant of the sequence of SEQ ID NO:X are directly contiguous Nucleic acids which hybridize to the complement of these 20 contiguous polynucleotides under stringent hybridization conditions or alternatively, under lower stringency conditions, are also encompassed by the invention. Polypeptides encoded by these polynucleotides and/or nucleic acids, other polynucleotides and/or nucleic acids encoding these polypeptides, and antibodies that bind these polypeptides are also encompassed by the invention. Additionally, fragments and variants of the above-described polynucleotides, nucleic acids, and polypeptides are also encompassed by the invention.

[0082] In specific embodiments, polynucleotides of the invention comprise, or alternatively consist of, a polynucleotide sequence in which the 3′ 10 polynucleotides of the sequence of SEQ ID NO:X and the 5′ 10 polynucleotides of the sequence of one of the sequences delineated in column 6 of Table 1B are directly contiguous. Nucleic acids which hybridize to the complement of these 20 contiguous polynucleotides under stringent hybridization conditions or alternatively, under lower stringency conditions, are also encompassed by the invention. Polypeptides encoded by these polynucleotides and/or nucleic acids, other polynucleotides and/or nucleic acids encoding these polypeptides, and antibodies that bind these polypeptides are also encompassed by the invention. Additionally, fragments and variants of the above-described polynucleotides, nucleic acids, and polypeptides are also encompassed by the invention.

[0083] In specific embodiments, polynucleotides of the invention comprise, or alternatively consist of, a polynucleotide sequence in which the 3′ 10 polynucleotides of a fragment or variant of the sequence of SEQ ID NO:X and the 5′ 10 polynucleotides of the sequence of one of the sequences delineated in column 6 of Table 1B are directly contiguous. Nucleic acids which hybridize to the complement of these 20 contiguous polynucleotides under stringent hybridization conditions or alternatively, under lower stringency conditions, are also encompassed by the invention. Polypeptides encoded by these polynucleotides and/or nucleic acids, other polynucleotides and/or nucleic acids encoding these polypeptides, and antibodies that bind these polypeptides are also encompassed by the invention. Additionally, fragments and variants of the above-described polynucleotides, nucleic acids, and polypeptides, are also encompassed by the invention.

[0084] In further specific embodiments, polynucleotides of the invention comprise, or alternatively consist of, a polynucleotide sequence in which the 3′ 10 polynucleotides of one of the sequences delineated in column 6 of Table 1B and the 5′ 10 polynucleotides of another sequence in column 6 are directly contiguous. Nucleic acids which hybridize to the complement of these 20 contiguous polynucleotides under stringent hybridization conditions or alternatively, under lower stringency conditions, are also encompassed by the invention. Polypeptides encoded by these polynucleotides and/or nucleic acids, other polynucleotides and/or nucleic acids encoding these polypeptides, and antibodies that bind these polypeptides are also encompassed by the invention. Additionally, fragments and variants of the above-described polynucleotides, nucleic acids, and polypeptides are also encompassed by the invention.

[0085] In specific embodiments, polynucleotides of the invention comprise, or alternatively consist of, a polynucleotide sequence in which the 3′ 10 polynucleotides of one of the sequences delineated in column 6 of Table 1B and the 5′ 10 polynucleotides of another sequence in column 6 corresponding to the same Clone ID NO:Z (see Table 1B, column 1) are directly contiguous. Nucleic acids which hybridize to the complement of these 20 lower stringency conditions, are also encompassed by the invention. Polypeptides encoded by these polynucleotides and/or nucleic acids, other polynucleotides and/or nucleic acids encoding these polypeptides, and antibodies that bind these polypeptides are also encompassed by the invention. Additionally, fragments and variants of the above-described polynucleotides, nucleic acids, and polypeptides are also encompassed by the invention.

[0086] In specific embodiments, polynucleotides of the invention comprise, or alternatively consist of, a polynucleotide sequence in which the 3′ 10 polynucleotides of one sequence in column 6 corresponding to the same contig sequence identifer SEQ ID NO:X (see Table 1B, column 2) are directly contiguous. Nucleic acids which hybridize to the complement of these 20 contiguous polynucleotides under stringent hybridization conditions or alternatively, under lower stringency conditions, are also encompassed by the invention. Polypeptides encoded by these polynucleotides and/or nucleic acids, other polynucleotides and/or nucleic acids encoding these polypeptides, and antibodies that bind these polypeptides are also encompassed by the invention. Additionally, fragments and variants of the above-described polynucleotides, nucleic acids, and polypeptides are also encompassed by the invention.

[0087] In specific embodiments, polynucleotides of the invention comprise, or alternatively consist of a polynucleotide sequence in which the 3′ 10 polynucleotides of one of the sequences delineated in column 6 of Table 1B and the 5′ 10 polynucleotides of another sequence in column 6 corresponding to the same row are directly contiguous. In preferred embodiments, the 3′ 10 polynucleotides of one of the sequences delineated in column 6 of Table 1B is directly contiguous with the 5′ 10 polynucleotides of the next sequential exon delineated in Table 1B, column 6. Nucleic acids which hybridize to the complement of these 20 contiguous polynucleotides under stringent hybridization conditions or alternatively, under lower stringency conditions, are also encompassed by the invention. Polypeptides encoded by these polynucleotides and/or nucleic acids, other polynucleotides and/or nucleic acids encoding these polypeptides, and antibodies that bind these polypeptides are also encompassed by the invention. Additionally, fragments and variants of the above-described polynucleotides, nucleic acids, and polypeptides are also encompassed by the invention.

[0088] Many polynucleotide sequences, such as EST sequences, are publicly available and accessible through sequence databases and may have been publicly available prior to conception of the present invention. Preferably, such related polynucleotides are specifically excluded from the scope of the present invention. Accordingly, for each contig sequence (SEQ ID NQ:X) listed in the fourth column of Table 1A, preferably excluded are one or more polynucleotides comprising a nucleotide sequence described by the general formula of a-b, where a is any integer between 1 and the final nucleotide minus 15 of SEQ ID NO:X, b is an integer of 15 to the final nucleotide of SEQ ID NO:X, where both a and b correspond to the positions of nucleotide residues shown in SEQ ID NO:X, and where b is greater than or equal to a +14. More specifically, preferably excluded are one or more polynucleotides comprising a nucleotide sequence described by the general formula of a-b, where a and b are integers as defined in columns 4 and 5, respectively, of Table 3. In specific embodiments, the polynucleotides of the invention do not consist of at least one, two, three, four, five, ten, or more of the specific polynucleotide sequences referenced by the Genbank Accession No. as disclosed in column 6 of Table 3 (including for example, published sequence in connection with a particular BAC clone). In further embodiments, preferably excluded from the invention are the specific polynucleotide sequence(s) contained in the clones corresponding to at least one, two, three, four, five, ten, or more of the available material having the accession numbers identified in the sixth column of this Table (including for example, the actual sequence contained in an identified BAC clone). In no way is this listing meant to encompass all of the sequences which may be excluded by the general formula, it is just a representative example. All references available through these accessions are hereby incorporated by reference in their entirety.

TABLE 3

| | SEQ | | | | |
|---|---|---|---|---|---|
| | ID | | EST Disclaimer | | |
| Clone ID | NO: | Contig | Range | Range | |
| NO: Z | X | ID: | of a | of b | Accession #'s |
| HTTEK47 | 11 | 573649 | 1-396 | 15-410 | AA400005, AW205244, AW134723, and |
| | | | | | AI689951. |
| HMSKP13 | 12 | 708207 | 1-387 | 15-401 | AA148393, AC023891, and AC023891. |
| HLHCT68 | 13 | 764745 | 1-425 | 15-439 | R91150, H67895, AI205078, Z25012, C05212, |
| | | | | | Z30134, AA194359, AC010344, AC010344, |
| | | | | | AC010344, AC008496, and AC008496. |
| HKAFF33 | 14 | 974200 | 1-175 | 15-189 | AA335761, T58784, AA053162, AA220207, |
| | | | | | F07425, N34268, AA535485, C16914, |
| | | | | | F11628, F00945, AA380834, AA321294, |
| | | | | | AA437332, AA132565, T27675, AA527306, |
| | | | | | H11697, H63653, W24084, AW374230, |
| | | | | | AA158146, AL035930, AA369234, |
| | | | | | AW407037, AA361916, W24054, AA977833, |
| | | | | | AI910189, AA358563, AA385962, T28025, |
| | | | | | N42582, AA336109, AA321393, AI910249, |
| | | | | | AI696864, AA305941, AW179215, H98493, |
| | | | | | AW385684, AA522541, AW062331, W44848, |
| | | | | | AA188398, AA535767, AA159383, C18543, |
| | | | | | AA053691, AA371996, AW384708, |
| | | | | | AA133506, AW404398, AI910244, AI565209, |
| | | | | | AI114563, AI910095, N24326, AA382286, |
| | | | | | H95866, H68295, AW361810, M24045, |
| | | | | | Z33459, AJ001977, L38251, M24046, |
| | | | | | D83957, X99704, D50852, D64145, X76189, |
| | | | | | U41420, Z47377, U07230, AF220291, |
| | | | | | D49820, D83030, D64146, D64151, D64152, |
| | | | | | D64147, M24097, L20091, M84386, |
| | | | | | AF115462, D83031, Z83247, X73518, |
| | | | | | X96582, Y09156, X82122, X78343, D31817, |
| | | | | | M28172, M84174, X87841, U06487, U06695, |
| | | | | | Y11843, L54059, M99388, U41386, X67818, |
| | | | | | X70856, X70857, Y18552, M21963, U60218, |
| | | | | | M24096, AJ005590, D83956, M28206, |
| | | | | | M26432, X58536, D64148, Z15144, |
| | | | | | AJ010748, M84173, D50854, AJ001975, |
| | | | | | AJ001976, AJ001973, AJ001974, AJ272049, |
| | | | | | M26429, D83029, AF118891, AJ133100, |
| | | | | | E02883, M24030, AJ238694, AJ133267, |
| | | | | | AJ251755, AP000508, AF017331, AF015557, |
| | | | | | AF038574, AF201475, AF144665, AF102689, |
| | | | | | U61274, M12679, U06835, M26712, M28160, |
| | | | | | D64149, U56246, Y10520, D84394, M11799, |
| | | | | | U50088, AF198649, Y18649, AJ131853, |
| | | | | | U56260, AF028596, U60324, M63454, |
| | | | | | M16272, M26430, U11267, M32320, D49552, |
| | | | | | AJ010749, U09853, X83394, M16273, |
| | | | | | M54883, AP000507, E01341, M12967, |
| | | | | | S39758, X03945, AR008238, AJ245869, |
| | | | | | U60423, X55711, U38976, U41833, |
| | | | | | AF215919, D89334, U81012, Y18658, |
| | | | | | AF042290, AF115461, AF117767, AJ132660, |
| | | | | | Y11229, AJ133472, AJ249725, AF061862, |
| | | | | | AF205535, AF205539, AF213682, X83003, |
| | | | | | AC004204, U74386, U17572, AF115460, |
| | | | | | M24036, M24035, M24034, X61710, U04244, |
| | | | | | U64801, X81363, U88407, M24048, X83005, |
| | | | | | U74387, A93993, U76397, AF017317, |
| | | | | | AF065641, AF054010, AF061868, U70581, |
| | | | | | U90241, U91331, AF102568, AF110264, |
| | | | | | AF110261, AF098266, AF176080, AF220289, |
| | | | | | I14657, Y15745, AJ010323, AJ133476, |
| | | | | | AJ249164, Y14767, Y17065, AF061858, |
| | | | | | U96787, AF019568, AF015555, AF036553, |
| | | | | | AF145761, AF145763, AF104219, AF179632, |
| | | | | | AF189726, AF108425, U05581, AF017321, |
| | | | | | X75953, L42280, U05580, M24044, L20088, |
| | | | | | D85761, Y09058, D50300, M77774, M77778, |
| | | | | | M77777, D25275, M94052, M94053, M94051, |
| | | | | | L22028, M24040, M24039, M24032, U04243, |
| | | | | | L22649, L36318, L36591, U29083, U29480, |
| | | | | | L17005, U63653, D38526, X97321, X13116, |
| | | | | | M30679, AC004182, M24038, Y08994, |
| | | | | | U36492, M28207, L42024, U38975, |
| | | | | | AJ242661, L42345, X60253, X13115, |
| | | | | | M28204, M15470, Z46810, Z49112, Z79751, |
| | | | | | U11261, U11263, U60322, U05582, M24037, |
| | | | | | X61706, AF168611, U05579, I14637, I14638, |
| | | | | | and I14642. |
| HTLAQ18 | 15 | 1193114 | 1-820 | 15-834 | AA442624, AI382107, AW269016, AI286158, |
| | | | | | AA719238, AI001168, AI280133, AW339870, |
| | | | | | AA009701, AA932363, AI783808, AA587120, |
| | | | | | AI241143, AI266558, AI584159, AI370392, |
| | | | | | AW161202, AI499325, AI702343, AI494201, |
| | | | | | AI818728, W19236, AI491904, AI537516, |
| | | | | | AI916720, AI621341, AW059828, H89138, |
| | | | | | AA938181, AI357283, AI499581, AI817253, |
| | | | | | AI174819, AA749425, AI859644, AW020419, |
| | | | | | AI680369, AW080531, AI539260, AI273856, |
| | | | | | AI434760, AW083168, AA493923, AI801325, |
| | | | | | AL047344, AI690620, AI366959, AW058275, |
| | | | | | AW022494, AW020288, AI630474, |
| | | | | | AA769285, AW081110, AA768550, |
| | | | | | AW022542, AW020144, AA587590, |
| | | | | | AI634919, AI289791, AI360816, AA837290, |
| | | | | | AI345396, AI344935, AI656270, AW193299, |
| | | | | | AW189563, AA420722, AI312210, AI334893, |
| | | | | | AI611728, AA928539, AI208112, AI343091, |
| | | | | | AI401697, AI289436, AI865116, AI335476, |
| | | | | | AI311892, AI582871, AI336503, AI500706, |
| | | | | | AI345370, AL047152, AA888196, AI828806, |
| | | | | | AI687568, AL121270, AI538850, AL041772, |
| | | | | | AI582434, AI336565, AI440511, AI421662, |
| | | | | | N29277, AI340552, AI345471, AI954721, |
| | | | | | AI347569, AW191003, AL048499, AI961590, |
| | | | | | AA555145, AA504514, AL079910, AI050881, |
| | | | | | AI349279, AI440457, AW020381, AI538885, |
| | | | | | AI590755, AA651924, AL133054, S79832, |
| | | | | | AF022363, AL110218, AF132676, AF061836, |
| | | | | | D00174, AF205861, U87620, AF114168, |
| | | | | | Y10823, S77771, AL137292, X00861, |
| | | | | | A08456, A31057, AF111849, AF026124, |
| | | | | | I77092, A18777, AF028823, AF177401, |
| | | | | | AF085809, AF120268, AR038854, AR050959, |
| | | | | | D44497, AL122111, AL117583, M79462, |
| | | | | | A08910, A08911, A08909, X52128, A08907, |
| | | | | | A08908, U95739, AC004686, AC007392, |
| | | | | | AC009233, A70386, AL137523, U49908, |
| | | | | | Y18680, I18355, AL133099, I34392, |
| | | | | | AB022159, AC009501, E08516, AF200416, |
| | | | | | AF013249, AF036941, A27171, AF146568, |
| | | | | | AF022857, AF022858, AJ131955, A07588, |
| | | | | | AR012379, AL137284, AB007812, |
| | | | | | AL080162, AL080057, AL133010, AC002540, |
| | | | | | AC007172, AC002287, AC007458, S61953, |
| | | | | | AF090934, S36676, U76419, AF054988, |
| | | | | | AR059958, AL117457, AL133014, M64936, |
| | | | | | AF098162, AC004837, AC018767, AF035161, |
| | | | | | X72387, AF074604, A65336, E04233, |
| | | | | | U96683, AL080150, AF100931, A20553, |
| | | | | | AF082526, AL049300, AF113699, AR029490, |
| | | | | | D83989, AF111851, AL050277, AL133016, |
| | | | | | AL110228, Y08616, U95114, U75604, |
| | | | | | AF201468, I08319, AF169154, AF113690, |
| | | | | | AF110329, AL109672, AL133640, AF126488, |
| | | | | | AL110158, AL133062, AL133047, AL137662, |
| | | | | | AL117432, AL133565, E02221, AF108357, |
| | | | | | E06743, AC005968, AF161699, AF113689, |
| | | | | | X00474, AL137495, I32738, AL050092, |
| | | | | | AF124435, E01963, AC004399, AC003032, |
| | | | | | AC005353, AL096776, AF179633, AC005057, |
| | | | | | AP000161, AP000020, AL034374, AC005091, |
| | | | | | AL022147, AC005048, AC002416, Z94277, |
| | | | | | AC004690, AC008067, AC006222, |
| | | | | | AC008014, AL022170, AC007056, |
| | | | | | AC005291, AC007298, U66059, AF115410, |
| | | | | | AR016469, X73361, and AB026995. |
| HLYAW15 | 16 | 976531 | 1-383 | 15-397 | AI124815, AW402317, AW402511, |
| | | | | | AW405194, F13067, AI826037, AA160317, |
| | | | | | AW408434, AW403392, AA381090, |
| | | | | | AA224068, AA381088, AL039796, |
| | | | | | AA381030, D82221, AA102697, AA263135, |
| | | | | | AW402322, AA663896, D82177, AW327936, |
| | | | | | AA336651, D82189, AA295685, AA401643, |
| | | | | | H23327, W40489, AA227277, AA151951, |
| | | | | | AL138056, AW402698, AW402264, U46382, |
| | | | | | AW401505, AW401719, C18310, T29764, |
| | | | | | AA344828, AA310808, T52219, AW408440, |
| | | | | | AW403793, AW402754, D56208, AA159230, |
| | | | | | T52124, AA295712, AA380938, AA351420, |
| | | | | | AI359260, AW403872, AA449607, |
| | | | | | AA121088, R19052, AW402402, AA075796, |
| | | | | | AA100848, AW239462, R20954, F07582, |
| | | | | | AW402383, AA348993, AA157351, |
| | | | | | AA350486, AA173111, AA313847, |
| | | | | | AW401548, AW405127, AI750810, |
| | | | | | AA381116, F05537, AA152039, AA299668, |
| | | | | | AW403070, AW402855, F06315, AW405549, |
| | | | | | AA352960, AA348075, AW403114, |
| | | | | | AW408321, AW401393, AW404182, |
| | | | | | AI365653, AW273557, AA381988, |
| | | | | | AW385684, AA378689, AW402401, |
| | | | | | AW402424, AW405525, AA381052, |
| | | | | | AA381239, AA160101, AA296474, |
| | | | | | AA158109, W44826, AA129140, AA005245, |
| | | | | | N44225, AA160714, AA488534, F06589, |
| | | | | | AA055685, AA352502, AW404586, |
| | | | | | AA081491, AA853431, AA143626, |
| | | | | | AA159125, AA358919, AA083156, F06198, |
| | | | | | AI214149, AW403253, AI214126, R54504, |
| | | | | | AA143468, AA263158, AI696864, AA085102, |
| | | | | | W52004, T10924, AA916617, AA160070, |
| | | | | | AA102181, AA312514, R30668, AA305941, |
| | | | | | C16914, U96942, Z46808, X75953, X64366, |
| | | | | | M24038, L42282, L42283, AJ131118, |
| | | | | | X90391, Y13029, Y09118, U64801, M15470, |
| | | | | | D50290, D50291, U75533, M19757, M24075, |
| | | | | | U14943, U11263, X84725, L09736, M84694, |
| | | | | | M84383, M84384, M24037, E03438, U11261, |
| | | | | | U17572, L41353, D31816, Y08995, M24035, |
| | | | | | M95530, X61710, X61706, M19756, X81363, |
| | | | | | E02885, M58636, L41925, U03698, L42345, |
| | | | | | M80670, E03437, Z15143, Y08994, M68964, |
| | | | | | M32319, AC004182, U11265, D50300, |
| | | | | | M28205, E02884, D50299, L04696, U17107, |
| | | | | | U30904, U80945, U30936, L42281, L41214, |
| | | | | | AF170577, L40599, M84381, M84385, |
| | | | | | AJ133267, Z22651, L04695, E02248, X61709, |
| | | | | | D44499, U03027, U03859, U06862, L11603, |
| | | | | | L19937, U50710, U70528, M84382, L41086, |
| | | | | | D44501, U90566, L38504, D49824, |
| | | | | | AF022783, L11666, U04244, AJ250917, |
| | | | | | U90563, U90564, U90565, M84380, M63454, |
| | | | | | U11267, X03664, M33573, U31971, M32320, |
| | | | | | L20090, AJ245869, X13116, M30679, |
| | | | | | X60253, U09864, D50295, M28203, |
| | | | | | AF115461, AF118895, U11262, U11266, |
| | | | | | L07950, X73578, L19923, U27608, D83043, |
| | | | | | AF115460, L11571, L11570, D50296, |
| | | | | | AF016641, U36392, L09735, U01848, |
| | | | | | U35431, D50293, L22027, L33923, |
| | | | | | AB008102, Z33453, D44500, M86403, |
| | | | | | D14343, AF026218, D50294, AF118892, |
| | | | | | D25275, M24039, L32862, AJ249724, |
| | | | | | AF071767, U04243, L22028, AF056981, |
| | | | | | U90561, M24045, M94053, Y09157, M32318, |
| | | | | | X61707, AF130734, M24036, L36591, |
| | | | | | AJ133471, AF190276, Y17193, X03665, |
| | | | | | X60255, X60693, X60254, L36318, |
| | | | | | AF065644, AJ132659, AF118893, AF118894, |
| | | | | | L42280, L20089, X13115, AF002268, E01341, |
| | | | | | M12967, M11799, S39758, X03945, Y12378, |
| | | | | | U90560, U90562, AR008238, U80670, |
| | | | | | AF028595, D87665, M54883, M24033, |
| | | | | | U50091, M12678, AJ243433, U93915, |
| | | | | | U58643, X55711, AF226838, Y18552, |
| | | | | | AJ007603, D83956, M22794, U58315, |
| | | | | | L22649, U05581, D85761, M77778, M77777, |
| | | | | | M77776, M77775, X99734, Y09058, M24032, |
| | | | | | U42837, D85762, U63653, AF017334, |
| | | | | | AF181857, AF181844, M94052, M94051, |
| | | | | | M24040, U21053, U29083, U29480, |
| | | | | | AF118891, X64454, U52169, U36492, |
| | | | | | L42024, AF208430, AF072765, AF189013, |
| | | | | | AF108428, X86704, U05580, U05582, |
| | | | | | L20086, AF198652, Y11228, X90390, |
| | | | | | AF105029, AF181846, AJ007605, X99704, |
| | | | | | Y18288, Y18648, AF115464, Z46810, |
| | | | | | AJ238702, AJ006020, AF023442, AF135550, |
| | | | | | M77774, A93992, AF096631, D64149, and |
| | | | | | D64150. |
| HMCFY36 | 17 | 943638 | 1-302 | 15-316 | AW408434, AW402317, C03945, AW327936, |
| | | | | | AW405194, AI696864, AW402511, |
| | | | | | AA263135, T68508, AW402322, AA663896, |
| | | | | | AA294911, AW405525, AW401505, |
| | | | | | AA352603, AW401548, AW239462, |
| | | | | | AA366365, AW402264, AW401719, |
| | | | | | AA361489, AA158146, AA147151, C18310, |
| | | | | | AA488534, AA361477, D82189, AA159413, |
| | | | | | AA158109, AI124815, AA112349, AA151951, |
| | | | | | AA160714, AA477506, AW403872, |
| | | | | | AL039796, AA372227, C19056, AA263158, |
| | | | | | AA121088, AA581164, AA385962, |
| | | | | | AW402402, AA100848, AA335761, |
| | | | | | AA151891, W24084, F11628, H11697, |
| | | | | | R34651, W24054, AA220207, N42582, |
| | | | | | AA361916, D82221, AW403392, AI359260, |
| | | | | | T75330, AA160037, D82177, T28025, |
| | | | | | X94481, L76091, AB030573, X96473, |
| | | | | | Z46808, L20090, E03438, U06697, AJ005590, |
| | | | | | E02248, M80670, E03437, Y08994, M68964, |
| | | | | | L41925, M32319, AF004370, L76931, |
| | | | | | U58110, U31334, Y13029, D50300, D50291, |
| | | | | | U75533, M19757, U14943, M28205, U03698, |
| | | | | | M95530, AJ002151, U28759, L41086, |
| | | | | | U32660, U11263, Z15143, M24037, L41214, |
| | | | | | U16309, D31816, M84380, U15639, M33573, |
| | | | | | U05581, U16298, Y15840, L31798, X84725, |
| | | | | | M24035, U70528, L36591, M84382, |
| | | | | | AF035648, AF035649, D50295, U09864, |
| | | | | | U29083, U96942, AB030574, U37325, |
| | | | | | X13116, AJ271160, L22028, L42024, U34810, |
| | | | | | U83580, M29864, AF118891, U15638, |
| | | | | | AF035647, E02885, X90391, D50290, |
| | | | | | M58636, L42282, M24075, L42345, L42146, |
| | | | | | AB032598, AF118894, AJ223282, U15640, |
| | | | | | U14756, U11261, U11267, X75953, X64366, |
| | | | | | Y08995, L11571, M24038, AJ131118, |
| | | | | | X61710, X61706, U04244, U64801, L42283, |
| | | | | | M32320, U90560, U05577, X90390, U50091, |
| | | | | | Y15841, AB032097, AB036049, AB036050, |
| | | | | | X86704, X95410, L76094, U18659, L42280, |
| | | | | | U74387, U18660, D44499, U11262, U17572, |
| | | | | | AB032094, AB032095, AB032096, |
| | | | | | AB032599, AB036051, AJ002676, X94480, |
| | | | | | L76088, L76089, L76090, L42506, AF033351, |
| | | | | | M83193, M83191, AJ238702, L07950, |
| | | | | | U05575, U03027, U03859, L11570, D25275, |
| | | | | | M94053, L09735, L22027, M24039, L11603, |
| | | | | | L19937, X61709, U04243, L36318, |
| | | | | | AF016641, L42281, X81363, AJ250917, |
| | | | | | D49824, M28203, X94574, U74386, |
| | | | | | AB032933, U05583, D44501, D14343, |
| | | | | | U11266, M83195, M83194, M83192, M86403, |
| | | | | | U05582, AB030575, X94482, X99734, |
| | | | | | U32678, L76093, Y09058, D50293, D50294, |
| | | | | | D50296, M77774, M77778, M77777, M77776, |
| | | | | | M94052, M94051, L09736, L11666, M84694, |
| | | | | | U31971, U50710, U80945, L22649, U29480, |
| | | | | | U30936, U36392, M19756, M84384, U63653, |
| | | | | | AF056981, X60693, U90566, M15470, |
| | | | | | X13115, M24045, U50086, L42296, Y14205, |
| | | | | | D44500, D50693, L20088, L20089, U06862, |
| | | | | | M24036, M24040, M24032, U17107, L38504, |
| | | | | | L41353, AF170577, M84381, L32862, |
| | | | | | U90561, AB032093, X87268, L76935, |
| | | | | | L76934, U18790, L75942, L76932, L76933, |
| | | | | | L36979, U90562, X60255, M24048, M28204, |
| | | | | | AF118895, AF118892, D84394, U05585, |
| | | | | | Y09118, U11265, U05578, E02884, Y09157, |
| | | | | | D50299, L04696, L04695, X61707, U30904, |
| | | | | | AF115461, L40599, M84383, X60254, and |
| | | | | | Z22651 |
| HMSPF61 | 18 | 1226544 | 1-644 | 15-658 | D80195, D80193, D59927, D51423, D59619, |
| | | | | | D80210, D81030, D80391, D80240, D80253, |
| | | | | | T03269, D80227, D80196, D80219, D80043, |
| | | | | | D58283, D80188, D80022, D59889, D80366, |
| | | | | | D51799, D80038, F13647, D59275, C75259, |
| | | | | | D80045, C15076, D80378, C14014, D50995, |
| | | | | | D80134, D81026, D59467, D59787, D80949, |
| | | | | | D80168, D80212, AA285331, C14227, |
| | | | | | C14429, D50979, T11417, D80164, D58253, |
| | | | | | T11051, D80166, D59695, D59859, D80269, |
| | | | | | D80268, D80064, D59502, D80024, D57483, |
| | | | | | D59610, AW178893, D80241, D81111, |
| | | | | | D52291, C14331, AW177440, D51060, |
| | | | | | AW178775, C14389, AW369651, AA305409, |
| | | | | | AW179328, AW378532, D51079, AI905856, |
| | | | | | AW352158, D51097, AW178762, AW360834, |
| | | | | | AW177501, D80522, AW177511, D80014, |
| | | | | | D51022, AI557751, AW360811, AW378540, |
| | | | | | AA305578, AW366296, AW375405, |
| | | | | | AW378534, AW377671, D80251, AW360817, |
| | | | | | D80248, AW375406, AW179220, AW179332, |
| | | | | | AW377672, AW179023, AW178905, |
| | | | | | AA514188, AW177505, AW360841, |
| | | | | | AW352171, AW377676, AW352170, |
| | | | | | AW177731, AW178907, AW179019, |
| | | | | | AW179024, AA514186, C05695, D80133, |
| | | | | | AW178906, AW179020, AW177456, D80258, |
| | | | | | AW367967, AW179329, AW178980, |
| | | | | | AW177733, AW378528, AW178908, |
| | | | | | AW179018, AW178774, AW178914, |
| | | | | | AW378543, AW378525, D80132, D80302, |
| | | | | | AW178781, AW352174, D80439, AW178911, |
| | | | | | AW352163, D80247, AA809122, T48593, |
| | | | | | AL048680, D51103, AA033512, D80157, |
| | | | | | AW367950, AW378533, C06015, D45260, |
| | | | | | D58246, D59503, AI557774, AI525923, |
| | | | | | C03092, H67854, H67866, AW360855, |
| | | | | | AW378542, AI525917, AI535959, AI525920, |
| | | | | | AA514184, C14973, AI525227, C14046, |
| | | | | | C05763, AI525235, A67220, A25909, D34614, |
| | | | | | D26022, AR025207, Y17188, A62300, |
| | | | | | X67155, A62298, X68127, D88547, A85396, |
| | | | | | AB012117, AR066482, A85477, A78862, |
| | | | | | A86792, D89785, U87250, A84916, I19525, |
| | | | | | AJ132110, A44171, X93549, X82626, |
| | | | | | AR018138, AF135125, I18371, S69292, |
| | | | | | AR064240, AF058696, AR008278, Y12724, |
| | | | | | AR051191, AB028859, S78798, X89963, |
| | | | | | AR008430, AR062871, I15997, AR037157, |
| | | | | | A80951, X92518, AR051190, A43601, |
| | | | | | X60736, A94995, AR008443, A20702, |
| | | | | | AR062872, AR017907, A43189, AR062873, |
| | | | | | A43188, A20700, AR023705, A84772, |
| | | | | | A84776, A84773, A84775, AR067731, |
| | | | | | AR067732, A58522, A91750, A84774, I50126, |
| | | | | | I50132, I50128, I50133, A45456, AR016514, |
| | | | | | Y09669, AR066488, A82595, AR060138, |
| | | | | | A26615, AR052274, AR060385, A30438, |
| | | | | | AB002449, AR066487, A43192, A43190, |
| | | | | | AR038669, Z32749, AR066490, D50010, |
| | | | | | X55486, D88507, I18367, AB033111, Y17187, |
| | | | | | AB012121, M60510, A70867, A63261, |
| | | | | | AR016691, AR016690, U46128, AR000511, |
| | | | | | AR008408, AR060133, D13509, A64136, |
| | | | | | A68321, I14842, AR054175, AB023656, |
| | | | | | U87247, AF123263, AR008277, and |
| | | | | | AR008281. |
| HMWDR50 | 19 | 667595 | 1-565 | 15-579 | AA005245, AA021087, AA313847, W44826, |
| | | | | | AI750810, AA243092, AW408321, |
| | | | | | AW405127, AW401393, AA176192, |
| | | | | | AW405549, C17443, AA052922, AW403070, |
| | | | | | W56226, AW402424, AA129140, R27263, |
| | | | | | AA013055, W60367, AA299668, AA348993, |
| | | | | | N35264, T52117, AA381239, AA381052, |
| | | | | | AA296474, AA378689, F05537, AA853431, |
| | | | | | AW404182, AW401666, AA381988, |
| | | | | | AI214149, AI214126, AA152039, AW404586, |
| | | | | | AA058454, AA130130, N25137, AA100680, |
| | | | | | AA092258, AA158109, AA160037, R54504, |
| | | | | | M21533, AB014080, AC006139, AP000514, |
| | | | | | M16714, AJ251960, AF117228, L76290, |
| | | | | | AJ245567, Y18651, AB012686, AJ271225, |
| | | | | | AB005048, X64880, AJ223972, AB012685, |
| | | | | | AF055066, K02883, AB023056, AP000519, |
| | | | | | M20022, M30681, X00492, M31183, |
| | | | | | AF101046, Z93949, Z93776, X55710, |
| | | | | | AF148862, AJ002533, M32505, X87678, |
| | | | | | M32506, X87680, L78455, L78934, L79943, |
| | | | | | AF111103, Z55558, Z58713, AF111102, |
| | | | | | Z58696, U02976, U02977, U41837, |
| | | | | | AF004918, X03210, M18964, X03443, |
| | | | | | X01652, AB014080, AB014080, AC006139, |
| | | | | | and AC006139. |
| HSSJM44 | 20 | 1175100 | 1-2355 | 15-2369 | AA633868, AI953254, AA858030, AI377035, |
| | | | | | AA600028, AI948432, AI347033, AI819852, |
| | | | | | AI953812, AI274863, AA913660, AI221391, |
| | | | | | AA402834, AI682227, AA313382, AI393729, |
| | | | | | R43673, T07940, T75200, AA402685, |
| | | | | | Z46198, H10173, T34442, AA594521, |
| | | | | | AW050919, T07941, AI150326, AA921803, |
| | | | | | AA775669, AI301221, AI394223, AI869224, |
| | | | | | Z41820, AW074819, R13072, AI424149, |
| | | | | | AA357096, AA383450, AI335517, |
| | | | | | AW302961, AI611494, AI348865, AI224202, |
| | | | | | AA368045, AW302995, and AI252073. |
| HPTXN38 | 21 | 974195 | 1-350 | 15-364 | AW327936, AI696864, AW408434, |
| | | | | | AA263135, AW402317, AW385684, |
| | | | | | AA970332, AA294911, AW402511, |
| | | | | | AW239462, C03945, AA527306, AA190717, |
| | | | | | AA158146, AW405194, T68508, AA366365, |
| | | | | | AA663896, AW402322, AA112349, |
| | | | | | AA321294, AA361489, AA385962, |
| | | | | | AW401505, AA335761, AA352603, F00945, |
| | | | | | AW351546, AW402698, AA147151, |
| | | | | | AA305941, AW405525, AA988615, |
| | | | | | AW401548, H11697, AA243206, AW293543, |
| | | | | | AW402264, AW401719, AA159413, |
| | | | | | AA158109, C18310, AI365653, AA527504, |
| | | | | | AA581164, AA220207, W24084, AA377064, |
| | | | | | AA372227, D82189, AA304603, AA477506, |
| | | | | | N42582, R34651, AA337991, AA160714, |
| | | | | | T10924, H98493, AI124815, AA151951, |
| | | | | | F11628, W24054, AA367387, AW403872, |
| | | | | | AA263158, C04018, AA100848, AA121088, |
| | | | | | AA361916, T28025, AW407037, AW392650, |
| | | | | | AA321393, AL035930, AA126083, AI359260, |
| | | | | | D82221, AW403392, AA160037, L76091, |
| | | | | | AB030573, D50291, M19757, U14943, |
| | | | | | AJ223282, U16309, X94481, AB032598, |
| | | | | | L31798, AB032097, U11263, L20090, |
| | | | | | M24037, U75533, X96473, U16298, U32660, |
| | | | | | L76090, D50290, M24075, D50300, |
| | | | | | AF035647, L76935, AB032599, L76089, |
| | | | | | U18660, Z46808, E03438, U18659, |
| | | | | | AB036049, AB036050, X95410, X86704, |
| | | | | | L76931, AB030575, AF004370, AB032095, |
| | | | | | U06697, AJ005590, U58110, L76934, U31334, |
| | | | | | Y15841, AB032094, X99734, U11261, |
| | | | | | M80670, M68964, L41925, M32319, X94482, |
| | | | | | Y08995, X61706, U28759, AB032096, |
| | | | | | L76088, X84725, L76095, AF035649, |
| | | | | | AJ002151, X90391, L42282, Y08994, Y14205, |
| | | | | | X87268, L76094, X61710, E02248, E03437, |
| | | | | | X86703, U18790, X64366, AJ131118, L42283, |
| | | | | | L22028, L36591, AB030574, AB032093, |
| | | | | | L76933, L36979, D50693, U70528, M84382, |
| | | | | | U29083, X75953, AJ002676, X94480, |
| | | | | | AF033351, L76930, U11267, L42280, |
| | | | | | M94053, U04243, AF035648, M29864, |
| | | | | | M28205, M32320, L42024, AF056981, |
| | | | | | U34618, L76932, U29880, U32678, U18789, |
| | | | | | L42146, L41214, M24035, U90562, U64801, |
| | | | | | Z15143, M58636, U15639, M83191, U90561, |
| | | | | | U96942, AB036051, L42506, L75942, |
| | | | | | L20089, U06862, Y13029, M33573, M77774, |
| | | | | | M77777, M77776, L76096, U90560, M24038, |
| | | | | | AB032933, AJ238702, L09735, U09864, |
| | | | | | U74387, L76093, X61709, M84384, M77778, |
| | | | | | U63653, D14343, X60693, U83580, D50295, |
| | | | | | U31971, M19756, L41086, M83194, M24048, |
| | | | | | U50710, AF115461, L09736, L36318, |
| | | | | | X60255, E02885, AF115460, M83193, |
| | | | | | X60254, L38504, U05581, U03027, U03859, |
| | | | | | L11603, L19937, M84694, M84383, Y09058, |
| | | | | | M94052, M94051, L22649, U29480, M84381, |
| | | | | | Y09118, AJ250917, U37324, M62852, |
| | | | | | U15638, D49824, U90566, L42296, M83195, |
| | | | | | D83043, AJ251003, AJ006978, X13115, |
| | | | | | M24045, D25275, M24039, M86403, L20088, |
| | | | | | D50299, U30936, L42281, M28203, U37323, |
| | | | | | M14013, U05575, U50091, Y09157, L33923, |
| | | | | | AB008102, U43337, U17572, M15470, |
| | | | | | AF118892, U11265, L42144, L40182, |
| | | | | | X73578, U37325, Y15840, M29865, M24040, |
| | | | | | M24032, L04695, U17107, U30904, U03698, |
| | | | | | M95530, U05582, X81363, D44501, X61707, |
| | | | | | M32318, A28264, U15640, U04244, U11262, |
| | | | | | U11266, L20086, AF026218, U18661, |
| | | | | | L42345, Y14606, L07950, AJ237703, U05587, |
| | | | | | L11571, L11570, D50296, L04696, U36392, |
| | | | | | L40599, AF016641, M77775, M84385, |
| | | | | | M84380, Z33453, D44500, AF118895, and |
| | | | | | X94574. |
| HRKPA05 | 22 | 974201 | 1-136 | 15-150 | AA158146, H63653, AA437332, N42582, |
| | | | | | AA053162, H11697, N34268, AA977833, |
| | | | | | AA190717, AA053691, AA535767, T58784, |
| | | | | | AA133506, AA188398, W24054, W24084, |
| | | | | | F07425, AA321294, W44848, and N24326. |
| HTGFY58 | 23 | 974198 | 1-289 | 15-303 | AW327936, AW408434, AI696864, T68508, |
| | | | | | AA294911, AW402317, AW402511, |
| | | | | | AW385684, C03945, AW239462, AW402322, |
| | | | | | AW405194, AA663896, AW385181, |
| | | | | | AA243206, AA147151, F00945, AA190717, |
| | | | | | AA321294, AW402698, AA385962, |
| | | | | | AA581164, AA159413, AW402264, |
| | | | | | AW401719, AA335761, AA361477, D82189, |
| | | | | | AI124815, AA263158, AA367387, H11697, |
| | | | | | AA361916, R34651, W24084, W24054, |
| | | | | | N42582, AA151891, F11628, T28025, |
| | | | | | D82221, AW403392, AI359260, T75330, |
| | | | | | AB032093, L76933, L36979, X87268, |
| | | | | | U16309, L31798, U28759, AF035648, |
| | | | | | AF035649, U34618, U29880, U31334, |
| | | | | | X96473, AB032598, E02885, M58636, |
| | | | | | U15640, U90566, L76930, U14756, U83580, |
| | | | | | U15638, AF035647, L75942, L76932, L76094, |
| | | | | | U18660, U11265, E02884, L04696, L04695, |
| | | | | | U30904, D50295, Z15143, U32678, X94481, |
| | | | | | L76091, X94574, X86703, Z22651, U32660, |
| | | | | | L20089, U06862, L40599, D50299, L42345, |
| | | | | | AJ002676, X94480, X99734, AF033351, |
| | | | | | AB030573, L76090, L42506, U15639, |
| | | | | | M86403, U09864, D50290, L36591, X90391, |
| | | | | | L42282, U30936, M24075, M84381, Z46808, |
| | | | | | U96942, L42146, AJ223282, AB036049, |
| | | | | | AB036050, AB036051, X95410, AB008102, |
| | | | | | X75953, D50300, U17107, X64366, |
| | | | | | AJ131118, U64801, L42283, U06697, U90564, |
| | | | | | U18790, AF056981, AF004370, L22028, |
| | | | | | M24038, U75533, Y08994, M84385, M29864, |
| | | | | | AJ005590, AB032096, L76088, U11263, |
| | | | | | L76096, AJ238702, U90561, AJ002151, |
| | | | | | E02248, M80670, M24037, E03437, M68964, |
| | | | | | L41925, L42281, M32319, U90563, U90565, |
| | | | | | M32318, AB032097, D44500, L33923, |
| | | | | | D25275, U11267, M83192, L20090, U04244, |
| | | | | | D50293, U50710, E03438, M24039, M32320, |
| | | | | | L32862, U74387, AF130734, D44501, |
| | | | | | U14943, U16298, D87665, M83191, D50291, |
| | | | | | L11666, U80945, M19757, M84384, Y09157, |
| | | | | | X61707, D44499, U11266, X99735, M15470, |
| | | | | | M83193, U90559, L42280, L36318, U03027, |
| | | | | | U03859, D50294, D50296, L22027, L11603, |
| | | | | | L19937, X61709, U36392, M11799, |
| | | | | | AJ250917, AJ133267, D49824, U18659, |
| | | | | | U11262, M28203, M83195, M83194, L42145, |
| | | | | | L42144, L40182, M63454, L07950, L11570, |
| | | | | | AF016641, Y09058, M94052, M94053, |
| | | | | | M94051, U04243, L22649, U29480, L41086, |
| | | | | | L20088, X61710, U70528, AJ237703, |
| | | | | | M84382, M84383, U31971, M24040, M24032, |
| | | | | | AF105226, X55711, U11261, D50710, |
| | | | | | L09735, L42296, Y08995, X61706, U29083, |
| | | | | | M19756, M29865, X60254, M59840, U37330, |
| | | | | | U05575, U50086, U90562, AJ251003, |
| | | | | | Y15841, AJ271160, AJ006978, X60255, |
| | | | | | Y14205, Y09118, U90558, L42024, D50693, |
| | | | | | U05580, X64454, and U21053. |
| HTXJB01 | 24 | 1124596 | 1-987 | 15-1001 | AA988703, AA675914, AA303646, |
| | | | | | AA675909, AW367626, AW058625, N40329, |
| | | | | | T54177, AA352261, AA595003, AA565043, |
| | | | | | AA079556, U95729, AF021222, U95731, |
| | | | | | AF021221, AF021223, AF021224, X91625, |
| | | | | | U69978, U95730, U95732, U95733, U95734, |
| | | | | | AF021225, AF021226, AF055384, L14848, |
| | | | | | AB000878, AB000882, AP000506, U65416, |
| | | | | | AC006046, AP000507, AJ249394, AC004180, |
| | | | | | D84394, AF055385, AF055387, X92841, |
| | | | | | Y16807, Y18113, AF045598, U56944, |
| | | | | | Y16811, U56947, U56948, AF055388, |
| | | | | | Y16804, AB015600, U56942, U56943, |
| | | | | | U56945, Y16803, Y16809, AF097406, |
| | | | | | U56949, U56955, Y16801, Y16805, Y18111, |
| | | | | | Y18114, Y18116, U56941, Y16808, Y18112, |
| | | | | | Y18115, U56946, U56952, U56954, Y16810, |
| | | | | | AF097403, Y16806, Y18117, Y18118, |
| | | | | | U56940, U56950, AF097404, U56951, |
| | | | | | U56953, Y18110, AF045600, AF045597, |
| | | | | | AF045599, AF055386, AF045601, AF045596, |
| | | | | | AF045604, AJ242442, AJ242439, Y16802, |
| | | | | | AJ242438, AF045603, AF055389, AF045602, |
| | | | | | AJ242441, AJ242440, AJ242443, AF055390, |
| | | | | | AB014083, AC004208, AC004207, |
| | | | | | AC004170, AF055066, AB023058, AP000521, |
| | | | | | AP000515, AL022723, AJ242444, AJ242445, |
| | | | | | AC004200, AP000519, AB023056, |
| | | | | | AB003604, AB003602, AB003603, |
| | | | | | AB003601, AB003600, AB003599, |
| | | | | | AB003606, AB003607, AJ251156, AB003605, |
| | | | | | AB003608, AJ251158, AJ251160, U69624, |
| | | | | | U69625, U69628, U69623, U69630, U69626, |
| | | | | | U69629, U69627, L29409, U69631, L29411, |
| | | | | | L29410, L29408, L29406, L29407, U69622, |
| | | | | | AB003614, AB003609, AB003612, |
| | | | | | AB003610, AB003611, AB003616, AJ251159, |
| | | | | | AJ251157, AJ251161, AF106643, AF085013, |
| | | | | | AF106637, AF106655, AF085029, AF136159, |
| | | | | | AF106634, AF106640, AF106649, AF085037, |
| | | | | | AF011879, AF106646, AF136158, AF106633, |
| | | | | | AF106651, AF011839, AF106639, AF106648, |
| | | | | | AF011836, AF011848, AF079414, AF085020, |
| | | | | | AF011845, AF106642, AF085024, AF011887, |
| | | | | | AF011842, AF011860, AF136157, AF106632, |
| | | | | | AF106641, AF106635, AF106638, AF011847, |
| | | | | | AF011853, AF106647, U69965, U69968, |
| | | | | | U69967, U69977, U69964, U69971, U69966, |
| | | | | | and U69969. |
| HUFAK35 | 25 | 636241 | 1-209 | 15-223 | AA449607, AA351420, AA295712, |
| | | | | | AW402698, AA401643, AL138056, N44225, |
| | | | | | H23327, AW385684, D56208, AW402402, |
| | | | | | AW403793, AW402754, AA151951, D82221, |
| | | | | | AW403114, AW403392, AW393618, |
| | | | | | AA380938, AW403872, AW405525, |
| | | | | | AA336651, AA160317, AW401548, |
| | | | | | AW402264, AW401719, AW401505, D82177, |
| | | | | | C18310, AW408440, AA310808, AI365653, |
| | | | | | AW402322, D82189, AW239462, AW405194, |
| | | | | | AW402511, AW402317, AW408434, |
| | | | | | AA962801, AL039796, T29764, AA263135, |
| | | | | | AW327936, AI359260, AA350486, F07582, |
| | | | | | AA381116, AA075796, AA100680, |
| | | | | | AA132653, AA083156, AA348075, |
| | | | | | AA129140, AW402855, AW402401, |
| | | | | | AA227277, AA159230, R19052, AA081491, |
| | | | | | AA143626, U46382, F06589, AA055685, |
| | | | | | W52004, R54504, AA005245, AA352534, |
| | | | | | AA358919, AA970332, F06198, AA295230, |
| | | | | | AA160070, AF039198, AJ272049, U44064, |
| | | | | | AJ001977, AJ001975, AJ001976, AJ001973, |
| | | | | | AJ001974, D83957, Z22752, AP000508, |
| | | | | | D84394, AC004204, Y14624, AF223221, |
| | | | | | AF221124, M17567, M17566, Y16411, |
| | | | | | AJ133474, AF036554, AF147701, AJ245869, |
| | | | | | AJ133100, AF105226, M16273, M16272, |
| | | | | | AF223219, AJ238694, D50710, U90558, |
| | | | | | Y15746, Y17064, Y18538, U56246, Y18552, |
| | | | | | D83956, AJ238702, AF056981, U90561, |
| | | | | | E01341, M12967, S39758, X03945, |
| | | | | | AR008238, U90563, U90564, U90565, |
| | | | | | U90566, D50693, AF017330, AF015556, |
| | | | | | Y18533, AF145466, AJ249163, U56259, |
| | | | | | Y18660, AF036552, AF062587, AF015558, |
| | | | | | U90562, AJ251755, D50709, M54883, |
| | | | | | M11799, M59865, AF019567, AF145760, |
| | | | | | AF220290, AF015554, AF104218, AF016304, |
| | | | | | AF173007, L24491, U90560, U89946, |
| | | | | | U90179, AP000507, M63454, X00495, |
| | | | | | D77998, AB005048, AJ223972, L41086, |
| | | | | | X55711, AJ005199, AF065646, I14616, |
| | | | | | U31373, AF101046, AC004182, AJ245567, |
| | | | | | AJ271225, AJ133267, AJ133475, AF105240, |
| | | | | | L76290, D64150, U89947, U90178, X03664, |
| | | | | | X03665, M16007, D50853, M84172, M99389, |
| | | | | | U60321, AF017323, U90559, J03027, Z72423, |
| | | | | | AF042289, A93992, AF181857, AF072765, |
| | | | | | AF105029, AJ251960, K02883, AF117228, |
| | | | | | AJ250917, X99704, AJ251541, AJ271626, |
| | | | | | Y14684, AF002271, AF036556, U38975, |
| | | | | | AJ242661, D83741, D64149, AC004172, |
| | | | | | AC004193, U06835, U58643, AF115462, |
| | | | | | Y10520, Z46810, D89333, U93915, |
| | | | | | AF017328, AF081275, AF017334, AF205536, |
| | | | | | AF226838, Z93949, Z93776, Z72422, Z97370, |
| | | | | | L20091, D83031, X73518, X78343, X87841, |
| | | | | | M99388, U06695, X67818, X55710, M15497, |
| | | | | | AL022723, AJ238151, AF148863, U38976, |
| | | | | | L47206, L47231, L76288, L76291, L76289, |
| | | | | | Z96924, Z72007, AF076476, Z80228, Z75172, |
| | | | | | Z49112, Z79751, D64146, D64152, D83029, |
| | | | | | AF115464, L54059, U70580, AF096631, |
| | | | | | Y18648, AJ131852, AJ007603, M22794, |
| | | | | | U67748, U67330, U55022, AF002273, |
| | | | | | AF061863, AF072767, AF056483, U52175, |
| | | | | | U88254, AF108428, AF184216, AF208430, |
| | | | | | D38526, X97321, Z83247, X76189, X82122, |
| | | | | | M28172, M24030, Y11843, U41420, L38251, |
| | | | | | X70856, AF072763, U90244, AF189013, |
| | | | | | AF102563, AF170578, U59701, AF055066, |
| | | | | | I14588, AF002275, AF034409, AF135540, |
| | | | | | M26712, M24097, AB008136, Z80227, |
| | | | | | Y15842, U80670, D49820, AB032095, |
| | | | | | AP000519, Z33459, D64147, D64151, |
| | | | | | D64148, AJ007605, U76396, AF054011, |
| | | | | | U58315, U90240, AF188886, U76394, |
| | | | | | AC018433, AC004172, AC004182, |
| | | | | | AC004204, and AC004204. |
| HWHKC91 | 26 | 974191 | 1-419 | 15-433 | AA663896, AA263135, AL039796, |
| | | | | | AW401505, C18310, AW401719, AW402264, |
| | | | | | AW402317, AW402322, AW405194, |
| | | | | | AI124815, AW402511, AW403872, |
| | | | | | AW408440, AW402402, AW239462, |
| | | | | | AW408434, AA401643, AA160317, D82221, |
| | | | | | AA151951, AA310808, AW403793, D82189, |
| | | | | | AW402698, AW401548, AW402754, H23327, |
| | | | | | AA227277, AA100680, AW402383, |
| | | | | | AA548636, AA121088, AW327936, |
| | | | | | AI826037, AA224068, AA449607, |
| | | | | | AW405525, AW403392, AA102697, |
| | | | | | AA075796, AA158109, AA173111, |
| | | | | | AW385684, AA132653, AI365653, |
| | | | | | AW401393, AW408321, AW405127, |
| | | | | | AI750810, AW403114, R20954, D82177, |
| | | | | | AA160714, AA313847, AI359260, F13067, |
| | | | | | W52004, T29764, T52124, AA488534, |
| | | | | | AA381090, AA100848, AW405549, W40489, |
| | | | | | R19052, AW402424, D56208, AW403070, |
| | | | | | AA381088, AA058454, AA380938, T72958, |
| | | | | | AL138056, AA083156, AA005245, |
| | | | | | AA159413, AA381030, AA127128, |
| | | | | | AA336651, AA352960, AI214126, AI214149, |
| | | | | | AA152039, AA295712, N44225, AA351420, |
| | | | | | T52219, AA350486, AA344828, AA299668, |
| | | | | | F07582, AA378689, AA295685, AA381116, |
| | | | | | AA381239, AA159230, AA853431, |
| | | | | | AW404182, AW393618, F05537, AA348993, |
| | | | | | AAI57351, AA381988, W44826, AA160037, |
| | | | | | AA296474, AA348075, AA381052, |
| | | | | | AA352502, AA962801, AW402855, F06315, |
| | | | | | U46382, AA160101, AW402401, AA776025, |
| | | | | | F06589, AA358919, AW273557, AA143652, |
| | | | | | AA055685, AW404586, AA081491, T10924, |
| | | | | | AW403253, C19056, F06198, AA143468, |
| | | | | | AA352603, AA361477, R54504, AA129140, |
| | | | | | AA085102, AA160070, AA294911, |
| | | | | | AA295230, AA916617, AA143626, |
| | | | | | AA431065, AA102181, AA319533, R30668, |
| | | | | | T75330, T71226, AA527306, AW009172, |
| | | | | | AA372227, C16914, D44499, U03027, |
| | | | | | U03859, L11603, L19937, Y13029, L22027, |
| | | | | | D49824, D50294, L11666, U50710, AJ250917, |
| | | | | | D44500, U06862, D50293, U70528, M84382, |
| | | | | | L32862, X61709, M28203, D44501, U80945, |
| | | | | | U11262, U11266, L07950, M24033, L11571, |
| | | | | | L11570, D50296, AF016641, U36392, |
| | | | | | AF170577, D50295, L42281, M95530, |
| | | | | | M84385, U17572, D31816, U03698, M84380, |
| | | | | | X81363, U11265, E02884, D50299, L04696, |
| | | | | | U17107, U30904, U30936, L40599, U04243, |
| | | | | | M84381, Z22651, Y09118, L41214, L04695, |
| | | | | | M94053, Z46808, U01848, U35431, U09864, |
| | | | | | L22649, M24039, X64454, AJ245869, |
| | | | | | D85762, M33573, M24036, U21053, Y09058, |
| | | | | | M24035, L36318, U64801, E03438, M94052, |
| | | | | | M94051, L09736, M84694, M84383, U96942, |
| | | | | | U11261, D50290, Z15143, M24075, D85761, |
| | | | | | M77775, M24032, AF115461, Y08995, |
| | | | | | X61710, X61706, D25275, L42345, U11267, |
| | | | | | E02885, M58636, X13116, M30679, M24040, |
| | | | | | U29480, U31971, M32320, L41925, Y13567, |
| | | | | | X91749, M24034, U04245, U21052, U29057, |
| | | | | | L41353, M32317, M19756, M84384, X75953, |
| | | | | | M80670, E03437, Y08994, M68964, D50291, |
| | | | | | U75533, X64366, X90391, M24038, L42283, |
| | | | | | M32319, M19757, L17005, U88407, U14943, |
| | | | | | L42024, L36591, AJ131118, L42282, |
| | | | | | AF022783, M28205, AF189017, X90390, |
| | | | | | X84725, M63454, X60253, U04244, L09735, |
| | | | | | L22028, U29083, U11263, M24037, U90563, |
| | | | | | U90564, U90565, X60255, X60693, M77778, |
| | | | | | M77777, M77776, U36492, E02248, D50300, |
| | | | | | X99704, Z46810, L42280, D83956, X60254, |
| | | | | | L19923, U63653, U56246, Y18552, L33923, |
| | | | | | Y09157, M32318, X61707, AF118892. |
| | | | | | AF130734, D83043, M86403, AF118894, |
| | | | | | AF115460, AB008102, X70856, M77774, |
| | | | | | M84172, D64150, D64152, L20089, |
| | | | | | AF118893, X73578, U27608, M28172, |
| | | | | | M99389, D64151, L41086, M15470, Z46809, |
| | | | | | Z15144, D50853, U06695, U41420, L38251, |
| | | | | | D50854, M84173, M84174, D64146, M24045, |
| | | | | | M24097, L20088, U90566, Z33453, X82122, |
| | | | | | D64148, D83029, AF118896, L38504, |
| | | | | | L20090, AP000507, X67818, D64149, |
| | | | | | X83394, AF026218, X77658, Z83247, |
| | | | | | X76189, AJ010748, AF168611, E02883, |
| | | | | | L24373, U41386, X97321, U05581, AJ133267, |
| | | | | | X70857, AF115464, Y11843, X73518, |
| | | | | | X87841, M24030, D49552, AJ010749, |
| | | | | | Z33459, D64147, D87665, U44064, D84394, |
| | | | | | AF118895, M99388, D83031, X78343, |
| | | | | | D38526, X96582, Y09156, D31817, U09853, |
| | | | | | and U06487. |
| HTSFJ40 | 27 | 1172826 | 1-1080 | 15-1094 | W28953, AA313257, AI401170, H19139, |
| | | | | | R54508, H10122, H08285, R59784, F08505, |
| | | | | | AA490183, AI270117, AL046409, AI284640, |
| | | | | | Z43765, AI963720, R52605, AW088846, |
| | | | | | AI431303, AI334443, AW193265, AA682912, |
| | | | | | AW303196, AI305766, AI613280, |
| | | | | | AW301350, AW419262, AA720702, |
| | | | | | AA470969, AL042853, AW327868, |
| | | | | | AA610491, AA857486, AL045053, |
| | | | | | AL044940, AL041690, AW265385, |
| | | | | | AL138455, AI350211, AL138265, AI623720, |
| | | | | | AI345654, AI110770, AW072923, AI890348, |
| | | | | | AL037683, AA468022, AW276827, |
| | | | | | AI754658, AA581903, AA483223, |
| | | | | | AW407578, AL046205, AI307608, |
| | | | | | AW238278, AI281881, AI133164, AL119691, |
| | | | | | AA101689, AI754336, AL038474, AA877817, |
| | | | | | AA577906, AL134972, AW270270, |
| | | | | | AI801482, AA551503, AI355206, AI821271, |
| | | | | | AI538852, AW274349, AI457397, AA623002, |
| | | | | | AW410400, AW408717, AA515909, |
| | | | | | AI345681, AI345675, AA680243, AA503473, |
| | | | | | AI732120, AL042420, AA908687, |
| | | | | | AW438643, AL038705, AI679782, AL048626, |
| | | | | | AI537506, AW028429, AA522942, |
| | | | | | AA523837, AI289067, AI559705, AI619997, |
| | | | | | AA584167, AW302903, AI754253, |
| | | | | | AW021207, AW304584, AI375710, |
| | | | | | AI064864, AA587256, AW406755, |
| | | | | | AW268300, AA533333, F08180, AA531372, |
| | | | | | AL120687, AW083402, F36273, AW004911, |
| | | | | | AW274346, AA631507, AW088202, |
| | | | | | AA846876, AI345518, AI688846, AA507824, |
| | | | | | AA719292, AL038785, AL119984, |
| | | | | | AA521399, AI341664, AI254615, AA446657, |
| | | | | | AI469968, AA601355, AI568678, AW193432, |
| | | | | | AA526787, AL079645, AA599920, AD12309, |
| | | | | | AA491831, AI888518, AI962050, AI625244, |
| | | | | | AI814735, AW338086, AA806796, |
| | | | | | AA649642, AI708009, AA126450, AA521323, |
| | | | | | AW021583, AW302013, AI061334, |
| | | | | | AI696962, AI744995, AA493471, AL042753, |
| | | | | | AL046457, AW163293, AA523815, |
| | | | | | AA491284, AA664015, AI270559, AA610493, |
| | | | | | AA846935, AI583283, AA503475, AA469451, |
| | | | | | AW162049, H71429, AI471481, AW271904, |
| | | | | | AI929531, AI339850, AI805363, AA525824, |
| | | | | | AI192631, AA482711, AA569167, AA613345, |
| | | | | | AA244357, AI570261, AI633025, AI305547, |
| | | | | | AI345157, AW029038, AA639248, AI358571, |
| | | | | | AL043009, AI610159, AI053672, AI298710, |
| | | | | | AI053623, AL048925, AW276435, AI281697, |
| | | | | | AI890918, AA810269, AA713815, AI732865, |
| | | | | | AA493708, AL039958, AA584581, AI246119, |
| | | | | | AA569471, AW062724, AA780515, |
| | | | | | AA828042, AW131249, AI249997, |
| | | | | | AA679514, AL120269, N53150, AI368745, |
| | | | | | AF015149, AC005529, AC005902, D83989, |
| | | | | | AL022323, AL139054, I51997, AC006285, |
| | | | | | AC006120, AC005777, X54180, U18391, |
| | | | | | U18394, AC004808, AL020993, AC005257, |
| | | | | | AC007216, AC006271, AF196779, U18395, |
| | | | | | AC007541, X55926, U57009, Z98745, |
| | | | | | AC004989, AC004491, Y18000, AL121748, |
| | | | | | AC004019, AC005037, AF015156, AF015151, |
| | | | | | AL020995, U18393, AC005632, AC006030, |
| | | | | | U95742, U18392, AC005242, AC004832, |
| | | | | | AC002310, AL035697, U02531, AC004963, |
| | | | | | AC007014, AC007191, U57007, X54175, |
| | | | | | X54181, AL080242, Z86061, AC004519, |
| | | | | | AL031319, AC006441, AC007052, X54178, |
| | | | | | U57008, AC007677, AC004650, AC005678, |
| | | | | | X54179, AC006501, AC016025, AL035659, |
| | | | | | AC005244, Z69917, AC004686, AC003003, |
| | | | | | AC004453, AC005019, AF015147, |
| | | | | | AC005387, AL122021, AC002347, |
| | | | | | AC003664, AC005154, X54176, X53550, |
| | | | | | AL031577, U67801, AC005821, AC000041, |
| | | | | | X55927, U18398, U57006, AL035420, |
| | | | | | AL021808, AC005216, AC004816, |
| | | | | | AC004884, AL049745, AL022721, |
| | | | | | AC006101, AF015148, AC005829, AP000049, |
| | | | | | U02532, AC006006, AL121892, AC005306, |
| | | | | | AL049874, AP000311, AC005291, AC002395, |
| | | | | | AC005859, AF027390, AL136295, AL080243, |
| | | | | | AC004638, AC003962, AC008372, X55931, |
| | | | | | AC004236, AC007283, AC000052, |
| | | | | | AC004690, Z98742, AL031777, AC004987, |
| | | | | | AC003075, U18399, AL031257, AC006128, |
| | | | | | AC007688, AC004751, AL031428, |
| | | | | | AL031311, AC005527, AC006017, |
| | | | | | AC006208, AC005899, AC007051, |
| | | | | | AC004493, AL049712, AP000131, AP000209, |
| | | | | | AL133485, Z49816, AB020859, AP000552, |
| | | | | | AC002429, AC006539, AL034548, AJ003147, |
| | | | | | AC007151, X54177, X55923, AC007663, |
| | | | | | Z98051, AC005261, AL035668, AC002128, |
| | | | | | AP000248, AP000095, AL034351, AC005740, |
| | | | | | AP000555, U62293, U63721, AC005694, |
| | | | | | U67231, AC002385, U18387, AP000459, |
| | | | | | AC007488, AC006373, AC006482, |
| | | | | | AC007043, AP000239, AL049775, AC005247, |
| | | | | | AC004053, AC007666, AF020503, |
| | | | | | AC008115, AL022315, AF024533, AC004381, |
| | | | | | AC005726, AC006211, AP000365, AL008718, |
| | | | | | AL031587, AL031289, U18396, AL023575, |
| | | | | | X88791, AC004099, AC004593, AC003957, |
| | | | | | AC000066, AC005081, AF041427, |
| | | | | | AC005486, AC005699, AL049760, |
| | | | | | AD000092, AC008168, AL096701, |
| | | | | | AC005217, AL050097, AL031054, Z83840, |
| | | | | | AL121591, Z94277, AC007298, AC002401, |
| | | | | | U63630, U66059, AP000501, AL078474, |
| | | | | | AC004948, Z99716, AC005913, AL022163, |
| | | | | | AC009247, AL022400, AL109753, Z22650, |
| | | | | | AC005971, AC006251, U85195, U91321, |
| | | | | | AC005763, AC002400, AL022302, |
| | | | | | AC006549, AP000036, AC002126, |
| | | | | | AC006213, U67233, AC002300, AC004998, |
| | | | | | AP000959, AF029308, AC003007, AF067844, |
| | | | | | AL035072, U91328, AL121653, AJ010770, |
| | | | | | X55925, AC005102, AL035071, AL023882, |
| | | | | | U69730, AE000658, L78833, U67832, and |
| | | | | | AC006040. |
| HEONO59 | 28 | 741361 | 1-848 | 15-862 | W37916, AW369323, AL138197, AA292636, |
| | | | | | AA789205, AA278688, AI077497, AI670821, |
| | | | | | AW117287, AA608906, AA382777, |
| | | | | | AA724269, AA278680, AA827227, AI160796, |
| | | | | | AA600253, AI990171, AA625768, W37874, |
| | | | | | AA421286, AA292637, AA844108, |
| | | | | | AA917528, AW316905, AA768446, and |
| | | | | | AF117210. |
| HEMBZ62 | 29 | 1078797 | 1-1196 | 15-1210 | AW138235, AW070706, R13025, AA346549, |
| | | | | | and AA317149. |
| HWBAO18 | 30 | 751125 | 1-383 | 15-397 | AL359711, AL359711, AL359711, AL109947, |
| | | | | | AL109947, AL109947, AL136222, and |
| | | | | | AL136222. |
| HTLEN77 | 31 | 1147024 | 1-1190 | 15-1204 | T89857, T89583, AL121270, AI349772, |
| | | | | | AI064830, AL121365, AL047042, AL045500, |
| | | | | | AL036396, AW117882, AW238730, |
| | | | | | AL119791, AI687376, AW268253, AI636456, |
| | | | | | AI349004, AI433976, AI868831, AL036274, |
| | | | | | AL047763, AI285735, AL038778, AW301409, |
| | | | | | AL135661, AI436456, AL036802, AI475371, |
| | | | | | AW103371, AI275175, AI909666, AL040243, |
| | | | | | AW071349, AI433157, AI815383, AI521012, |
| | | | | | AL036146, AI697137, AI687728, AI349645, |
| | | | | | AI635461, AI250293, AI702406, AI538716, |
| | | | | | AW195957, AI439087, AW162071, |
| | | | | | AI678302, AI568870, AI564719, AL036759, |
| | | | | | AI620284, AI340582, AL119049, AW169653, |
| | | | | | AI349933, AI866608, AI445432, AW089572, |
| | | | | | AI625079, AW274192, AI699857, |
| | | | | | AW071417, AI440426, AI590128, AL046849, |
| | | | | | AI281779, AI500553, AI863014, AL038605, |
| | | | | | AI500077, AI857296, AI498579, AI366549, |
| | | | | | AI580190, AW074993, AI567351, AL119748, |
| | | | | | AI439745, AI312152, AI345735, AL045903, |
| | | | | | AI349937, AI207510, AI906328, AW068845, |
| | | | | | AI540832, AI613017, AI249257, AL120854, |
| | | | | | AI920968, AW166645, AI343112, AI702433, |
| | | | | | AI497733, AW148320, AI800453, AI349614, |
| | | | | | AI800433, AI679724, AI686926, AW087445, |
| | | | | | AW080838, AI690751, AW303152, |
| | | | | | AI873731, AI349256, AI567632, AI758437, |
| | | | | | AI610307, AI282655, AI631107, AL120736, |
| | | | | | AI597750, AI907070, AI499463, AI499393, |
| | | | | | AI818683, AI682743, AI608667, AI673256, |
| | | | | | AA613907, AI633419, AI866002, AI349598, |
| | | | | | AI866780, AL048871, AI499131, AI281773, |
| | | | | | AL040169, AL043326, AI921379, AI440239, |
| | | | | | AI560012, AA572758, AI628205, AI597918, |
| | | | | | AA640779, AI690835, AI469532, AI568854, |
| | | | | | AW132121, AI568855, AI969601, AI224992, |
| | | | | | AI609592, AL038779, AI866887, AL036980, |
| | | | | | AW074869, AI475134, AW268768, |
| | | | | | AI348897, AI434281, AI682841, AI271786, |
| | | | | | AI800411, AI680113, AI889203, AI874109, |
| | | | | | AW301300, AI580984, AI934036, AI671679, |
| | | | | | AI889839, AI583316, AI251485, AI909662, |
| | | | | | AW167776, AI753683, AI813914, AI493248, |
| | | | | | AI969567, AW235035, AI919058, AI281762, |
| | | | | | AW085799, AI334902, AI149592, AI811863, |
| | | | | | AI469811, AI862142, AI635942, AI687415, |
| | | | | | AI818206, AI952114, AL036240, AL047041, |
| | | | | | AI802542, AI343059, AI687465, AW026882, |
| | | | | | AI269696, AI492540, AI570384, AA528822, |
| | | | | | AL036631, AI345860, AI610645, AA585422, |
| | | | | | AI696398, AI609580, AL042753, AI539771, |
| | | | | | AI696846, AI307466, AI366991, AI500659, |
| | | | | | AA508692, AI445025, AL044207, AI349226, |
| | | | | | AI687375, AW104724, AI591311, AI624668, |
| | | | | | AI754897, AI345744, AI569616, AL121014, |
| | | | | | AI684265, AI624859, AI612913, AI340519, |
| | | | | | AI536685, AI446606, AI872711, AA938383, |
| | | | | | AI318569, AW075351, AI620868, AI907061, |
| | | | | | AW118557, AI859733, AI799305, |
| | | | | | AW302965, AI609331, AW269097, |
| | | | | | AI309401, AI446628, AW183130, AI432969, |
| | | | | | AI432229, AL036247, AI690426, AI679764, |
| | | | | | AI636445, AW302992, AW002342, |
| | | | | | AI220734, AI619502, S68736, I48979, |
| | | | | | AL050393, AF090900, L31396, L31397, |
| | | | | | S78214, AF090934, A93016, AF125949, |
| | | | | | AF113013, AF078844, AL080060, Y11587, |
| | | | | | AF090901, I89947, AF118064, AF118070, |
| | | | | | AF113694, AL133016, AF113691, AL133640, |
| | | | | | AF090943, AL117457, AL133606, AF104032, |
| | | | | | AL117460, AF090903, AL137527, AL110196, |
| | | | | | AR059958, AL050146, AL049938, AL049452, |
| | | | | | AL110221, AF113690, AF113689, AJ242859, |
| | | | | | AL050149, AL122050, AB019565, AF090896, |
| | | | | | I89931, AF113676, U42766, X84990, |
| | | | | | AL050108, A08916, AF106862, AL133075, |
| | | | | | AL050116, AF113677, AL049314, AL122093, |
| | | | | | A08913, AF113019, AL049466, AL133557, |
| | | | | | AL096744, AF017152, AL137283, AL122121, |
| | | | | | AL080124, AL080137, AL050277, AL133565, |
| | | | | | E03348, AL137557, AL133093, Y16645, |
| | | | | | I48978, AF158248, AF113699, AL137459, |
| | | | | | AR011880, Y11254, X63574, AJ000937, |
| | | | | | AL133080, U91329, E07361, AF111851, |
| | | | | | AF177401, AL049430, AL122123, X82434, |
| | | | | | AF091084, AL050138, AF125948, AF146568, |
| | | | | | AF097996, AL117394, AL110225, E07108, |
| | | | | | AF079765, AL049300, AL137550, I49625, |
| | | | | | AL117583, U00763, AL133560, AF017437, |
| | | | | | A65341, S61953, A08910, AL117585, |
| | | | | | X70685, E02349, AJ238278, AL050024, |
| | | | | | AC007390, AL117435, AL049464, AL049382, |
| | | | | | A08912, AF067728, AF118094, I33392, |
| | | | | | A58524, A58523, AF183393, AL133113, |
| | | | | | AL137538, U72620, A77033, A77035, |
| | | | | | Z82022, AC002467, E05822, A08909, |
| | | | | | AL122110, AL137271, AL122098, AF091512, |
| | | | | | A03736, AI2297, AL049283, AF061943, |
| | | | | | X72889, AL137648, AL137463, U80742, |
| | | | | | AC006371, I03321, AC004686, AF087943, |
| | | | | | AC005940, Y09972, I09360, AC004987, |
| | | | | | X96540, I42402, AL080127, X93495, |
| | | | | | AL110197, X57961, AL096776, U35846, |
| | | | | | X65873, AC004093, AC006336, AL080159, |
| | | | | | U95739, U67958, I00734, AL137521, E00617, |
| | | | | | E00717, E00778, AL022147, AC004690, |
| | | | | | AF111112, AL110280, X98834, AC002464, |
| | | | | | AC007172, AJ012755, AL133014, AL133104, |
| | | | | | I26207, AR013797, U49908, AL133568, |
| | | | | | AC007298, A93350, E08263, E08264, I17767, |
| | | | | | AL133072, AL022165, L13297, I66342, |
| | | | | | AL137523, AL137560, E15569, AR000496, |
| | | | | | U39656, U58996, AF026816, AL035587, |
| | | | | | Y14314, AL137533, X83508, AC006944, |
| | | | | | AL122049, AF153205, AC004200, AF061981, |
| | | | | | AL034374, Z37987, AL133077, AL137476, |
| | | | | | and AF119337. |
| HTADZ74 | 32 | 1172825 | 1-1283 | 15-1297 | AI735624, AW192167, AI307682, AF077346, |
| | | | | | and AC007278. |
| HELHB88 | 33 | 1226704 | 1-3452 | 15-3466 | AI671143, AI580905, AI632369, AA773823, |
| | | | | | AW370310, AA773263, AA313515, |
| | | | | | AA985166, AL121153, AI382884, AA181724, |
| | | | | | AI750406, AI469456, AA024936, AA155593, |
| | | | | | AA024853, AL120063, T78993, T78788, |
| | | | | | T82245, AA155607, AI750407, AL134372, |
| | | | | | AA670080, L25219, AA247838, AI525585, |
| | | | | | AF114487, AF114488, AF064243, AF064244, |
| | | | | | U61166, AF127798, AF132672, AF132478, |
| | | | | | AF132481, AP000311, AP000117, AP000193, |
| | | | | | AP000049, AP000116, AP000050, AP000048, |
| | | | | | AP000308, AP000115, and AW594325. |
| HE9TD31 | 34 | 815845 | 1-941 | 15-955 | AI475682, AI439613, AA815076, AB033082, |
| | | | | | AF132480, and AF132479. |
| HGBDG55 | 35 | 815858 | 1-522 | 15-536 | AA368408, and AL360268. |
| HOUHL51 | 36 | 1126480 | 1-760 | 15-774 | AA431822, AI341790, AW295199, AI656610, |
| | | | | | AA037543, AW292290, AA431419, |
| | | | | | AA974280, AA815270, AA037457, AI651702, |
| | | | | | AA583011, AI208605, AI419858, AA620408, |
| | | | | | AA417333, AA417321, W28051, AA251183, |
| | | | | | AI917695, W28536, AI557751, D80258, |
| | | | | | T11417, D80064, D59627, C06015, D81026, |
| | | | | | C15076, D59467, C14331, D80164, D80014, |
| | | | | | D59787, C14227, AI535686, D81030, D59503, |
| | | | | | F13647, D80166, AI557774, C14389, D51799, |
| | | | | | AA809122, D59859, D80212, D58283, |
| | | | | | D59619, D80210, D80240, D51423, D80022, |
| | | | | | D50995, D80195, D80253, D58246, D50979, |
| | | | | | D80391, D59275, D80038, D80043, D80227, |
| | | | | | D80188, D59502, D80219, D57483, D59889, |
| | | | | | D80196, D80269, D80168, D80522, |
| | | | | | AA305578, AA514184, D80439, C14014, |
| | | | | | D80268, D80133, D80045, AA305409, |
| | | | | | D80247, D80366, D51022, D80157, D80251, |
| | | | | | D51250, H67854, Z21582, C03092, H67866, |
| | | | | | AI024754, AI525920, C14973, C05763, |
| | | | | | T02974, D59551, AI525227, AI525235, |
| | | | | | D45273, AI535961, C16955, Z33452, A84916, |
| | | | | | A62298, A62300, A82595, AR018138, |
| | | | | | AR008278, AJ132110, AR060385, AB028859, |
| | | | | | AF058696, AB002449, AR008277, |
| | | | | | AR008281, I14842, AR054175, and I79511. |
| HEOPP67 | 37 | 827630 | 1-436 | 15-450 | AA641653, Z99396, AF181972, and |
| | | | | | AF181973. |
| HKAOV71 | 38 | 827679 | 1-743 | 15-757 | AF123303, and AF004161. |
| HFIJC31 | 39 | 828148 | 1-519 | 15-533 | AA885328, N79858, and AI184184. |
| HDQID90 | 40 | 831976 | 1-953 | 15-967 | AA767219, AI809238, AI219470, AA767092, |
| | | | | | AA114887, T71487, AA464762, AA504439, |
| | | | | | Z25261, N87679, D57415, AA278335, |
| | | | | | AW300598, W46278, AA669095, D56990, |
| | | | | | D54675, AI797687, AI948608, AA909071, |
| | | | | | AW236181, AI718165, AB033082, AF132480, |
| | | | | | AF132479, and AC002350. |
| HKACD80 | 41 | 1206594 | 1-1937 | 15-1951 | AI191318, AI978812, AA586860, AA805184, |
| | | | | | AI628509, AI582366, W73797, W73745, |
| | | | | | AI620297, AW083832, AW239293, |
| | | | | | AW386876, AI056600, AI056739, AI362766, |
| | | | | | AI494212, AI077551, AA935678, AI348675, |
| | | | | | AI358232, AA251769, AA968828, AA659758, |
| | | | | | AI891139, C06060, AA746268, AA251926, |
| | | | | | AA506524, H58621, D81244, AA291462, |
| | | | | | H58622, AW193598, R38144, R67182, |
| | | | | | AI919497, AI250032, AA604444, AI567397, |
| | | | | | AA905208, AA836253, AA551675, |
| | | | | | AW087829, AI364618, AI421662, R57498, |
| | | | | | AW080157, AW166086, AI813914, R59996, |
| | | | | | AL043152, AI680498, AI469754, AL079794, |
| | | | | | AI540179, AI554821, AI874261, AL119511, |
| | | | | | AL045413, AL119399, AL042382, AI560545, |
| | | | | | AI366900, AW262491, AW262042, |
| | | | | | AI954504, AI089970, AI677646, AI679164, |
| | | | | | AL119457, AI868204, AI431909, AI453328, |
| | | | | | AI538085, AI680221, AI056328, AI536923, |
| | | | | | AW162194, AI553926, AI567302, AI538908, |
| | | | | | AI525934, AI921746, AI799199, AI582871, |
| | | | | | AW129947, AW020381, AI805671, |
| | | | | | AA693331, AA514684, AI687134, AI280747, |
| | | | | | AI184903, AI696714, AI609409, AW089932, |
| | | | | | AI812107, AL037454, AI564426, AI470293, |
| | | | | | AW148876, AI783569, AI648458, AI673278, |
| | | | | | AI891084, AI865906, AI628015, AL042544, |
| | | | | | AI818353, AI819663, AW079572, AI887163, |
| | | | | | AI950688, AI355277, AI801152, AI702527, |
| | | | | | AL042191, AI203903, AW089006, AI696583, |
| | | | | | AI536563, AI798373, AA848053, AI633125, |
| | | | | | AI439745, AI698391, AL037104, AI538850, |
| | | | | | N25033, AW160905, AI610667, AI520785, |
| | | | | | AW080346, AI520862, AI921371, AI863382, |
| | | | | | AI918435, AI475815, AW150778, AI623941, |
| | | | | | AI690748, AI818562, AI469532, AI249946, |
| | | | | | AI499890, AW149869, AI961286, AI345688, |
| | | | | | AI624548, AI524179, AL037081, AI691131, |
| | | | | | AI581139, AI889213, AI374987, AA808175, |
| | | | | | AI539260, AI623179, AA832154, AI824557, |
| | | | | | AW074605, AI890391, AA190341, AI524654, |
| | | | | | AI587114, AI564290, AW084447, |
| | | | | | AW104641, AI336575, AI453767, AI886206, |
| | | | | | AI287326, AW082532, AI499131, |
| | | | | | AW090102, AA693355, AI498067, |
| | | | | | AL043168, AI368579, AW162118, |
| | | | | | AW152415, AI744243, AA868961, AI826941, |
| | | | | | AI798456, AI627874, AI801592, AI872154, |
| | | | | | AL118781, AI249877, AI583578, AI590423, |
| | | | | | AW169653, AI922996, AI633061, AI309769, |
| | | | | | W45039, AI866127, AW088591, AW025279, |
| | | | | | AI520809, AI887620, AW189332, AI247193, |
| | | | | | AW118553, AW129616, AW301344, |
| | | | | | AW160916, AI863002, AI972070, AI612852, |
| | | | | | AI921479, AI401697, AI890223, AI141400, |
| | | | | | AL045453, AI245279, AI684021, AI433611, |
| | | | | | AI345415, AW151785, AI635032, AI690813, |
| | | | | | AW085639, AI816292, AI610690, AA731241, |
| | | | | | AW132001, AI359787, AI473451, AI921464, |
| | | | | | AI917963, AW236186, AI244105, |
| | | | | | AW089844, AI564723, AI927233, |
| | | | | | AW104724, AA857847, AF086313, U77594, |
| | | | | | AF090900, AL137530, A21625, Y11587, |
| | | | | | AF200464, AF111851, AF102578, U02475, |
| | | | | | AF090934, AF159615, AB025103, AF114784, |
| | | | | | Z13966, AC002471, AC005374, AF076464, |
| | | | | | AL133084, X79812, I33392, L04859, X97332, |
| | | | | | AL049314, A77033, A77035, AF141289, |
| | | | | | AL133047, AF139986, AL080140, AF038847, |
| | | | | | S36676, U58653, A65340, AF100931, |
| | | | | | AF069506, AF084644, AF084645, AR068466, |
| | | | | | I32738, AF061795, AF151685, AL137523, |
| | | | | | AL133061, AF113019, X80340, AL137271, |
| | | | | | E01314, U35846, AL137292, AR022283, |
| | | | | | AL137284, AL050143, S78453, AF113677, |
| | | | | | AF026008, AF081197, AF081195, AL050149, |
| | | | | | A07588, AF182215, AL133640, X84990, |
| | | | | | AB007812, S54890, AL080124, AL136884, |
| | | | | | X62580, AL133062, AL080126, AL117435, |
| | | | | | A58524, A58523, A08907, A32826, A30330, |
| | | | | | A32827, A30331, AF000167, U70981, |
| | | | | | AF094480, AL137529, AL137711, AF044323, |
| | | | | | AF106657, U72621, AL137294, AL096728, |
| | | | | | I48978, AR029580, Y10655, AF119336, |
| | | | | | AL035587, U73682, AF061981, AF019298, |
| | | | | | AF029750, AF047716, AL133070, AF031147, |
| | | | | | AF077051, AF167995, I89947, E12580, |
| | | | | | AL080234, S77771, AL133075, AL137558, |
| | | | | | AF036941, A12297, A08910, A03736, |
| | | | | | A08909, AF067728, A91160, X99971, |
| | | | | | X65873, A91162, AL137550, AL034417, |
| | | | | | AL049996, A08908, L10353, AF115392, |
| | | | | | U58996, AL117416, AF017152, Z37987, |
| | | | | | AL110221, AL122045, AF032666, A18777, |
| | | | | | E00984, I04527, AL122110, U92992, |
| | | | | | AL133067, AL049382, E12579, AL137459, |
| | | | | | AL137547, U75604, AR038854, AL117648, |
| | | | | | X82434, AL137554, A08912, AF026124, |
| | | | | | U62807, AL096751, I68732, A08911, |
| | | | | | AL009179, AF078844, AF145233, A65341, |
| | | | | | X60786, AL117587, AF114818, AF079763, |
| | | | | | AF126488, AJ005870, AL137660, AL137254, |
| | | | | | X93328, AL137479, X00861, AF169154, |
| | | | | | X99257, AF168992, AL133088, Y13350, |
| | | | | | U90884, AL080110, I80062, AF111849, |
| | | | | | AL122098, AF000301, AL080162, AL050116, |
| | | | | | AL137533, AF060555, AL080150, S76508, |
| | | | | | AL133049, AF106862, Z97214, X72889, |
| | | | | | E15582, A08913, AJ131955, AL122104, |
| | | | | | Z82022, U67082, AL137538, AL122100, |
| | | | | | AF090886, AF118558, AF124728, AL137256, |
| | | | | | AL137534, AF039138, AF039137, AF030513, |
| | | | | | AR034821, AL137480, AF107018, AR064250, |
| | | | | | X15132, AL137627, X82397, AC004383, |
| | | | | | AL137478, AR012379, AL137560, |
| | | | | | AR059958, M27260, S82852, AL117443, |
| | | | | | AL050138, AF054831, U49908, AR050959, |
| | | | | | U75378, A15345, X61970, and AC004594. |
| HTEED80 | 42 | 849075 | 1-1299 | 15-1313 | W87655, AA465429, AA203572, AI479983, |
| | | | | | AI540082, AA192438, AA836236, AA465358, |
| | | | | | AA829419, AA507269, AW290970, |
| | | | | | AI796504, AA904433, AA368409, AA688079, |
| | | | | | AW189971, AA601527, AA393948, F36549, |
| | | | | | W87656, AA320120, AI862710, F30605, |
| | | | | | AA196706, and AJ242978. |
| HE8TI39 | 43 | 1222770 | 1-2807 | 15-2821 | AI681280, AA251688, W60548, Z45463, |
| | | | | | H86769, F07768, H86760, Z42543, |
| | | | | | AW339546, R15292, Z44339, H86765, |
| | | | | | H86774, H86962, AA091738, R58217, |
| | | | | | F06562, AW377760, and R21166. |
| HSDJH12 | 44 | 1163916 | 1-788 | 15-802 | AA428452, AA134294, T83462, AI219740, |
| | | | | | AA010048, AI478566, and AI990289. |
| HE8PY29 | 45 | 887862 | 1-741 | 15-755 | AI271550, AI753504, AA809220, AW081079, |
| | | | | | W78099, AW386283, AI264068, AI219556, |
| | | | | | AW082138, AA455733, AI382746, |
| | | | | | AA548778, AA431230, AF092137, |
| | | | | | AF100751, AF040252, AC009948, AC009948, |
| | | | | | and AC009948. |
| HNTMB90 | 46 | 910934 | 1-718 | 15-732 | Z99396, AL038837, AL037051, AL036725, |
| | | | | | AA631969, AL039074, AW392670, |
| | | | | | AL036418, AL039085, AL039564, AL036858, |
| | | | | | AL039156, AL039108, AL038509, AL039109, |
| | | | | | AL039128, AL036924, AL037094, AL039659, |
| | | | | | AL038531, AL036196, AL039625, AL039648, |
| | | | | | AL045337, AL036767, AL119497, AL037082, |
| | | | | | AL037526, AL036190, AL038447, AL119483, |
| | | | | | AL037639, AW372827, AL039678, |
| | | | | | AW363220, AL039629, AW384394, |
| | | | | | AL119457, AL039423, AL036238, AL039150, |
| | | | | | AL119319, AL040992, AL119324, AL042909, |
| | | | | | U46350, AL038520, AL119484, AL119391, |
| | | | | | AL037077, AL119443, AL119522, U46351, |
| | | | | | AL119355, AL119363, AL037726, U46341, |
| | | | | | U46347, U46349, AL134533, AL039410, |
| | | | | | AL038851, AL119341, AL134531, AL119335, |
| | | | | | AL119418, AL119396, AL039386, AL036998, |
| | | | | | AL036733, AL119496, AL037615, AL119439, |
| | | | | | AL036268, AL037085, AL119401, AL119444, |
| | | | | | AL037205, AL037027, AL037178, AL045353, |
| | | | | | U46346, AL036679, AL042614, AL036765, |
| | | | | | AL042965, AL042975, AL134528, AL134538, |
| | | | | | AL042984, AL036191, AL119399, AL134920, |
| | | | | | AL042544, U46345, AL036719, AL043003, |
| | | | | | AL043019, AL042542, AL042551, AL042450, |
| | | | | | AL043029, AL134542, AL134532, AL037021, |
| | | | | | AL037054, AL036836, AL036158, AL119464, |
| | | | | | AL036774, AL036886, AL036999, AL036964, |
| | | | | | AR066494, AR060234, AR023813, |
| | | | | | AR064707, A81671, AR069079, AB026436, |
| | | | | | AR054110, and AR064706. |
| HMKCH92 | 47 | 910936 | 1-789 | 15-803 | T78768, R13299, R14933, AB003592, |
| | | | | | D87248, AC018833, AC034192, AC026206, |
| | | | | | AC026206, AC022381, and AC022381. |
| HTELV86 | 48 | 1126499 | 1-1572 | 15-1586 | AW241703, AA923237, AA382531, |
| | | | | | AA918449, AA738033, AA019310, C14331, |
| | | | | | AA305409, D80164, D51060, D51799, |
| | | | | | D80166, D59619, D80210, D80240, C14014, |
| | | | | | D81030, D59859, D80212, D59502, C14389, |
| | | | | | D80219, C15076, D51423, D59275, D80253, |
| | | | | | D50979, AA514186, D80188, D80439, |
| | | | | | D80022, D80366, D80195, D58283, D80133, |
| | | | | | D80391, D80248, D59787, D59467, D80043, |
| | | | | | D80227, D81026, D59610, D57483, D80024, |
| | | | | | AI557751, D80196, D80269, AA809122, |
| | | | | | D59889, D51022, D80522, D80268, D50995, |
| | | | | | D59927, AA305578, D80038, AA514188, |
| | | | | | D80193, D80045, D80247, D80241, D80251, |
| | | | | | AW360811, D80378, AI535686, AW177440, |
| | | | | | N71180, D51103, D80302, AW178893, |
| | | | | | C14407, D80157, AW377671, AW375405, |
| | | | | | T03269, AW178906, AW366296, D51759, |
| | | | | | AW360817, C14344, AW179328, AW375406, |
| | | | | | AA853033, AW378534, AW179332, |
| | | | | | AW377672, AW179023, AW178905, |
| | | | | | AW020592, AW378532, N71199, AW378528, |
| | | | | | AW178762, H67854, N81164, C06015, |
| | | | | | AI345688, AI696583, AW377676, |
| | | | | | AW352171, AW352170, AW177731, |
| | | | | | AI272244, AW178907, AW179019, |
| | | | | | AW179024, T48593, AW020397, AA749449, |
| | | | | | D51250, N25033, AI918408, D45260, |
| | | | | | AI557241, AW360834, AI612885, |
| | | | | | AW179020, AW178775, AW075382, |
| | | | | | AW022168, D81111, AW022593, AI525653, |
| | | | | | AW177456, AW195253, AW178980, |
| | | | | | AI915795, AW178914, AW074057, |
| | | | | | AW178774, AW023351, AW177733, |
| | | | | | AL120696, AW178908, AW179018, |
| | | | | | AA505147, AW080076, C03092, AW019988, |
| | | | | | AI261815, AI280082, D59695, AW177728, |
| | | | | | AW022981, AI557238, AW021182, |
| | | | | | AA099519, D59627, AW020480, AW023863, |
| | | | | | AW020328, AW021178, AW020425, |
| | | | | | AI590043, AW022826, AI345010, |
| | | | | | AW022299, AW189802, AI538247, |
| | | | | | AW021059, AI582912, AA857847, AI282673, |
| | | | | | AI696340, AI094092, AI469764, AI473471, |
| | | | | | AW021561, AI539260, AW264009, |
| | | | | | AI698391, AI918554, AI961309, AW378543, |
| | | | | | AI061180, AW378525, H67866, AW022760, |
| | | | | | AW352163, D80134, D80949, AI525923, |
| | | | | | AI289310, AI889147, N49165, AW192300, |
| | | | | | AI567971, D80132, AI224373, AW021909, |
| | | | | | AW020406, AW023469, D51079, AA127461, |
| | | | | | AI866510, AI547227, AA975952, AW302990, |
| | | | | | AA868486, AW020710, AW021693, |
| | | | | | AA641818, AI469516, AW079432, AI866461, |
| | | | | | U35371, X99043, A62298, A84916, |
| | | | | | AR018138, A82595, A62300, Y11505, |
| | | | | | U79457, Y17188, Z82022, A30438, |
| | | | | | AB028859, AJ132110, AR008278, Y17187, |
| | | | | | AF058696, AR060385, AB002449, S68736, |
| | | | | | I50133, X82626, X67155, A94995, D26022, |
| | | | | | Y12724, A25909, A91160, A67220, D89785, |
| | | | | | A78862, D34614, AR008443, I50128, I50126, |
| | | | | | I50132, Y08991, AF022857, AF022858, |
| | | | | | X68127, AR008277, AR008281, AR066488, |
| | | | | | AR016514, A45456, D88547, AR060138, |
| | | | | | A26615, AR052274, X92070, AF074604, |
| | | | | | AL133558, I48978, S63521, Y09669, A43192, |
| | | | | | A43190, AR038669, S73498, S83440, |
| | | | | | U46128, I14842, AR066487, U80919, |
| | | | | | AR054175, AR016691, AR016690, A51774, |
| | | | | | E12580, AF126247, AF113694, AL122049, |
| | | | | | X59812, AF090901, A08910, A08909, |
| | | | | | AF118558, AL137641, A08907, A08908, |
| | | | | | D44497, AF031147, E06788, E06790, |
| | | | | | AR068466, E06789, I52013, U53505, |
| | | | | | AF195092, X98066, AF131773, AF093119, |
| | | | | | I46765, AF081825, AF137367, A63261, |
| | | | | | S75997, AF117959, D50010, AL049382, |
| | | | | | U61971, U61970, AF044323, AR025207, |
| | | | | | AF180525, AL080126, I48979, AF143957, |
| | | | | | I25049, AF016271, AR005011, AL137479, |
| | | | | | AR038854, AL008706, AF097996, AR050959, |
| | | | | | X66871, AL080234, AF177401, AL096728, |
| | | | | | I00734, A31057, S36676, AL133088, |
| | | | | | AL133081, AL137459, E00617, E00717, |
| | | | | | E00778, AF139986, AL133049, AF057300, |
| | | | | | AF057299, AC004470, AL049276, AF211175, |
| | | | | | AL137259, A17115, A18079, AL079293, |
| | | | | | AF078844, AF113019, AF038562, AR005195, |
| | | | | | I33392, AL110296, S69510, AF040723, |
| | | | | | Y11435, U92992, AR008408, AL122104, |
| | | | | | X54971, I25048, AJ005690, M92439, |
| | | | | | AF192522, AL032822, AL021393, I29004, |
| | | | | | X66417, AL137657, I28326, AF051325, |
| | | | | | E01314, Y14314, AL133665, X97332, |
| | | | | | AF119336, AF090943, A65340, AL137560, |
| | | | | | and AL117626. |
| HNTAF23 | 49 | 910947 | 1-239 | 15-253 | AW392670, AL119355, AW372827, U46341, |
| | | | | | AL119483, AL119319, U46349, AL119457, |
| | | | | | AL119324, AW384394, AL119497, |
| | | | | | AW363220, Z99396, AL134920, AL134524, |
| | | | | | AL119484, AL119363, AL119391, U46350, |
| | | | | | U46347, U46351, AL119443, AL119444, |
| | | | | | AI142137, AL119341, AL134538, AL119439, |
| | | | | | AL119522, AL119396, U46346, AL043029, |
| | | | | | AL037205, AL134531, AL119335, AL042614, |
| | | | | | AL119399, AI142139, AL119496, AL134533, |
| | | | | | AL119418, U46345, AL043011, AL042984, |
| | | | | | AL043019, AL042544, AL042896, AL043033, |
| | | | | | AL042965, AL042975, AL042450, AL042542, |
| | | | | | AL043003, AL119464, AL042551, AB026436, |
| | | | | | A81671, AR060234, AR054110, AR066494, |
| | | | | | AR069079, and AR043113. |
| HNBUT01 | 50 | 1025375 | 1-1009 | 15-1023 | AA279757, AI632246, AI478566, AA977612, |
| | | | | | AI219740, AA716656, AA687260, AI801069, |
| | | | | | AA071046, AI985849, AW370598, |
| | | | | | AA630617, AW370599, AW370625, |
| | | | | | AA134295, AW390691, AI143764, D30955, |
| | | | | | AI990289, T79236, AW370620, AA352142, |
| | | | | | AA074442, AW071043, and AI744728. |
| HEMFI21 | 51 | 1128266 | 1-2215 | 15-2229 | AI670810, AI720056, AW195755, |
| | | | | | AW268679, AI400941, AI867849, AA053882, |
| | | | | | AI672024, AI880208, AW196438, AI655564, |
| | | | | | AI682042, AA034417, W27229, AW376127, |
| | | | | | AA425562, AI972198, AA883340, AA132258, |
| | | | | | AI584045, AA770253, AW137059, |
| | | | | | AA132362, AA132257, AA425357, T62545, |
| | | | | | AW243732, AA491390, AI915665, |
| | | | | | AA721474, AA483037, AI269187, AA724043, |
| | | | | | AA346646, AW390324, N22655, AW377734, |
| | | | | | AC006042, and AL078581. |
| HMSOL52 | 52 | 921126 | 1-1290 | 15-1304 | AI911515, AI360955, AW028045, AI796049, |
| | | | | | AI609712, AW195544, AI184337, AI470056, |
| | | | | | AI361065, N34939, AI017177, AI038779, |
| | | | | | AI440241, AI651451, AA789292, AA854683, |
| | | | | | AI765258, AI702748, and AA384884. |
| HHGAE47 | 53 | 922194 | 1-705 | 15-719 | AW025529, AW026010, AA657904, |
| | | | | | AA662803, AA886335, AA158820, AI475932, |
| | | | | | AW050607, AI885090, AI056120, AI244837, |
| | | | | | AA485566, AI375435, AA922036, AA878578, |
| | | | | | AA643750, AI056614, AW449834, |
| | | | | | AW197722, AI393408, AA485405, AI560410, |
| | | | | | AA161103, AI749095, AI720931, AW058170, |
| | | | | | AI446208, N57590, AI268967, AI832600, |
| | | | | | AI913781, AA910277, N52768, AI277003, |
| | | | | | AI914599, AI192693, N57604, AI673692, |
| | | | | | AW050712, AA631339, N52783, and |
| | | | | | AI919380. |
| HMCGL45 | 54 | 922195 | 1-1141 | 15-1155 | AW025529, AI475932, AW026010, |
| | | | | | AA886335, AA662803, AI056120, |
| | | | | | AW050607, AI885090, AI375435, |
| | | | | | AW449834, AA161103, AI244837, |
| | | | | | AA878578, AA922036, AW197722, |
| | | | | | AI056614, AI393408, AW058170, AA643750, |
| | | | | | AI560410, AI749095, AI720931, AI446208, |
| | | | | | N52768, AI913781, AI277003, AI268967, |
| | | | | | AA910277, AI914599, AI192693, N52783, |
| | | | | | AW050712, AA485405, AI673692, |
| | | | | | AA631339, AA657904, AA485566, |
| | | | | | AA158820, AI619710, AI560351, AI919380, |
| | | | | | N57590, AI832600, N57604, T25136, |
| | | | | | AW198090, AI499963, AW023338, |
| | | | | | AI638644, AI890214, AI538850, N75779, |
| | | | | | AI633125, AI686817, AI499570, AI500061, |
| | | | | | AI860027, AI473536, AI925164, AW163834, |
| | | | | | AI690813, AW162194, AA641818, AI684244, |
| | | | | | AI469505, AI376425, AI802542, AI673363, |
| | | | | | AI670009, AI498067, AW082532, AI433157, |
| | | | | | AI886055, AW080700, AI702073, AI884318, |
| | | | | | AW128834, AI633198, AI289310, AI620056, |
| | | | | | AI590043, AW103928, AI890907, |
| | | | | | AW152182, AI589428, AI961589, AI679550, |
| | | | | | AI961414, AI698391, AI479292, AI701097, |
| | | | | | AI570861, AI147292, AW169604, AL045413, |
| | | | | | AW081383, AI345688, AI245008, AI539800, |
| | | | | | AI950729, AI927233, AL079799, AI491775, |
| | | | | | AI872423, AI538980, AI288050, AI635634, |
| | | | | | AI440239, AA805434, AW161579, |
| | | | | | AW151893, AW148363, AI866465, |
| | | | | | AI538564, AI571439, AW083374, AL041150, |
| | | | | | AI973152, AI445611, AL047100, AI538116, |
| | | | | | AI687362, AI281757, AI241923, AA580663, |
| | | | | | AI440399, AI095003, AW022808, AI540674, |
| | | | | | AI954475, AI499890, AI471282, AI648494, |
| | | | | | AI927755, AI621341, AI445829, AI432030, |
| | | | | | AI915291, AI932503, AI341690, AI613038, |
| | | | | | AI866040, AW073865, AI699823, |
| | | | | | AW190194, AI559619, AL037582, AL037602, |
| | | | | | AI627988, AI685005, AL039086, AI348901, |
| | | | | | R41605, AI932794, AI345415, AI636588, |
| | | | | | AW163554, AI572096, AI612852, |
| | | | | | AW050998, AI580436, AI627893, AI568138, |
| | | | | | AA587590, AI869377, AL046466, AL118781, |
| | | | | | AI819545, AI270183, AI912434, AI567513, |
| | | | | | AI524179, AA830709, AW051088, I48978, |
| | | | | | I48979, AL137550, AF061573, A15345, |
| | | | | | I89947, I68732, A65340, AL117460, A77033, |
| | | | | | A77035, X63162, AF153205, AR029490, |
| | | | | | AL023657, D16301, AL117587, U78525, |
| | | | | | AL050366, E12747, AF067728, AF115392, |
| | | | | | AF090900, AR038854, A76335, E02349, |
| | | | | | AF102578, I33392, A58524, A58523, A08910, |
| | | | | | A08909, A65341, AJ005690, AL080159, |
| | | | | | A08908, Z82022, A58545, AL137294, |
| | | | | | AL080074, AL137533, A52563, AL137479, |
| | | | | | U37359, X70685, A93350, AF047716, |
| | | | | | A03736, AL122100, A08913, U49908, |
| | | | | | AL122110, X82434, AF183393, AF094480, |
| | | | | | Z37987, AL050393, A08912, Y10080, |
| | | | | | S54890, A08911, A08907, AL133049, |
| | | | | | AF113690, AF100931, AL137271, U35846, |
| | | | | | AL096744, Z13966, Y14314, AR034821, |
| | | | | | S76508, AF026816, AL136884, AF215669, |
| | | | | | AL049347, AR068753, AL050149, AF177401, |
| | | | | | AF039138, AF039137, AF146568, AL117435, |
| | | | | | X72889, X53587, AL050155, AL133112, |
| | | | | | AL133637, AF031147, U55017, X67688, |
| | | | | | AF090903, AL137480, D83032, AL050277, |
| | | | | | AF097996, AF200464, AL117457, AL133665, |
| | | | | | AL080163, Z97214, AL133623, AR020905, |
| | | | | | AF017437, AL122049, AF113699, AL110158, |
| | | | | | AF158248, AL137656, AL133010, A21103, |
| | | | | | AF111849, AL110221, AF061981, AL080148, |
| | | | | | X81464, L04849, A18777, S36676, |
| | | | | | AL137530, I25049, E01614, E13364, |
| | | | | | AF115410, AC002471, AC005374, S75997, |
| | | | | | I89931, AF145233, AL049339, A07588, |
| | | | | | AF087943, U95114, AL080110, AL080139, |
| | | | | | AL137529, L04504, S77771, AL117392, |
| | | | | | I49625, AF107847, AL117416, AL137459, |
| | | | | | Y09972, AF058921, I09499, AL137476, |
| | | | | | AL137537, AF114170, AL137526, AF090943, |
| | | | | | AL133558, E05822, I33391, Y11254, |
| | | | | | AJ000937, AL133080, AL122104, AF141289, |
| | | | | | U58996, AL133075, AL050116, S53987, |
| | | | | | AL137488, U72621, AF030513, AL133113, |
| | | | | | AL133072, AF032666, AJ012755, X83508, |
| | | | | | AF061943, A17115, A18079, A08916, |
| | | | | | AF106945, I89934, AL133067, U83980, |
| | | | | | Y10823, U90884, AL117585, X66862, |
| | | | | | X66871, AL050024, S82852, AF176651, |
| | | | | | X84990, I03321, U96683, AL137256, |
| | | | | | AF180525, A12297, AL137521, AF106862, |
| | | | | | AF057300, AF057299, AL110225, AL110218, |
| | | | | | AR011880, A18788, AF113694, AB016226, |
| | | | | | A08456, A86558, A76337, AF118092, |
| | | | | | E12806, AF026124, AF061795, AF151685, |
| | | | | | U73682, I32738, AF090901, AL122093, |
| | | | | | AL050092, AL050138, and AL137292. |
| HEOQN14 | 55 | 923752 | 1-1031 | 15-1045 | AI014538, AW006457, AI479414, AI805243, |
| | | | | | AI290929, AI129301, AI872459, AI601146, |
| | | | | | AI708870, AI973043, AI540074, AI186894, |
| | | | | | AI682389, AI654747, AA460832, AI392777, |
| | | | | | AA405714, AA649837, AI356090, AI358510, |
| | | | | | AW294364, AA954900, AA991687, |
| | | | | | AI540589, AI953865, AA977875, AW190678, |
| | | | | | R61326, R54477, AW009738, AA724308, |
| | | | | | AW297100, R54409, AA627570, AA504833, |
| | | | | | AA489470, H08185, R08582, AA778454, |
| | | | | | AI810108, Z41744, R43473, AA765208, |
| | | | | | AI698394, Z39824, H19140, Z41120, F03843, |
| | | | | | AA701889, AA159318, AW408231, |
| | | | | | AA404221, H84256, AW131981, AI401170, |
| | | | | | AA405779, AI475002, F01761, AW189730, |
| | | | | | H84262, F04422, AA404687, AA502309, |
| | | | | | AA371650, H29188, AA581151, AA477301, |
| | | | | | AA749407, AA477302, and AI144326. |
| HSOBC04 | 56 | 927280 | 1-1206 | 15-1220 | AA115298, AI741325, AI688227, AI819333, |
| | | | | | AA452504, AI925664, AI742595, AI174530, |
| | | | | | AA115338, AI567500, AA563582, AA461615, |
| | | | | | AI142563, AA807844, N94422, AI095261, |
| | | | | | AA569395, W58424, AA687480, AA479551, |
| | | | | | AA582573, AI081428, AA779677, AI280806, |
| | | | | | N24393, AA988617, AI863187, AA834079, |
| | | | | | AW302361, AI362861, AW273442, |
| | | | | | AA150123, AA553678, AI752480, AI312661, |
| | | | | | W52661, AI298150, AA463418, W72509, |
| | | | | | AA024450, W72139, AI037968, W79868, |
| | | | | | AI028169, AA477651, H39596, W02690, |
| | | | | | AI198327, AI952450, AA926794, AI087245, |
| | | | | | W74236, AW004736, AI334346, AI870989, |
| | | | | | H98040, AI689546, AI332748, W76066, |
| | | | | | AA150031, R40403, AI349417, AA595996, |
| | | | | | W80872, H99144, AW166280, W52767, |
| | | | | | AA496878, H25985, AI357863, R55375, |
| | | | | | AA363023, AW104147, AA378409, |
| | | | | | AI979074, AI376184, AI687489, T32290, |
| | | | | | N26307, H97338, N95244, W77880, |
| | | | | | AI917258, W25604, AI536791, AA024802, |
| | | | | | AA577352, AA328156, AA359865, |
| | | | | | AA367475, AA461442, AA358275, W80763, |
| | | | | | T09474, AA987427, AI611160, AA888165, |
| | | | | | AA595303, AI918172, W30769, AI201782, |
| | | | | | AA187662, W21074, AA411955, AA935961, |
| | | | | | AA090719, AA411956, AA451977, AI371307, |
| | | | | | AW074526, N79974, AI635472, N39751, |
| | | | | | AI612934, AA478489, AA102215, AI802295, |
| | | | | | AI750502, AA496836, AL133116, L07063, |
| | | | | | and AC012192. |
| HTXKL86 | 57 | 1212283 | 1-1486 | 15-1500 | AI014538, AW006457, AI401170, AI479414, |
| | | | | | AI805243, AI290929, AI129301, AI872459, |
| | | | | | AI601146, AI708870, W28953, AI973043, |
| | | | | | AI540074, AI186894, AI682389, AI810108, |
| | | | | | AI654747, AA460832, AI392777, AA405714, |
| | | | | | AA649837, H10122, AI356090, AA313257, |
| | | | | | AW294364, AI358510, AI540589, AA954900, |
| | | | | | AA991687, H19139, H08285, AW408231, |
| | | | | | AI953865, AA371650, R54508, AA977875, |
| | | | | | AW009738, AW297100, R59784, R54477, |
| | | | | | AW407594, F07194, AA724308, F08180, |
| | | | | | F08505, Z43765, AA627570, H08185, |
| | | | | | R52605, AA489470, F07185, AW190678, |
| | | | | | AW407965, R08582, F05493, AA504833, |
| | | | | | AA778454, R43473, AI698394, AA765208, |
| | | | | | R13670, H19140, Z45409, Z39824, |
| | | | | | AA461135, R13641, Z41120, F03843, |
| | | | | | AW131981, AA701889, AA159318, |
| | | | | | AA404221, H84256, AI475002, AA405779, |
| | | | | | AW189730, F01761, AA502309, R61326, |
| | | | | | H84262, AA404687, F04422, R54409, |
| | | | | | H29188, AA749407, AA581151, AA477301, |
| | | | | | Z41744, AA477302, AI144326, and |
| | | | | | AW513623 |
| HUJCT05 | 58 | 1125408 | 1-1625 | 15-1639 | AW268357, AI889091, C15588, AI949350, |
| | | | | | AI056961, AI124874, R39133, AA887911, |
| | | | | | AW023386, AC003962, and AF155116 |
| HBGMR22 | 59 | 1171965 | 1-808 | 15-822 | |
| HHFOC79 | 60 | 935406 | 1-1024 | 15-1038 | AI569931, AA450162, AA405198, H26214, |
| | | | | | H14443, N28528, R73380, AW015358, |
| | | | | | R48456, AI750978, AA358230, Z19130, |
| | | | | | AA359395, AA744173, H26831, and |
| | | | | | AC008745. |
| HMTBB17 | 61 | 1125265 | 1-576 | 15-590 | AA582539, AI963340, AI097093, AA286856, |
| | | | | | AI761614, AI149781, AI460219, AI032670, |
| | | | | | AI636161, AI819154, AI089302, H12042, |
| | | | | | AI811219, H05308, T95010, AA836993, |
| | | | | | AW271462, R37000, AI001803, AA904906, |
| | | | | | AA743196, AI015200, AA453607, F05000, |
| | | | | | AA578803, AI241466, AI033193, AA330970, |
| | | | | | F03322, F01968, AA037601, T75492, N47542, |
| | | | | | AW183219, AI288171, AA054759, F01965, |
| | | | | | AA651907, AL119324, AL119457, |
| | | | | | AL042544, AL119399, AW392670, |
| | | | | | AL119484, AL119439, U46347, AL119443, |
| | | | | | U46351, AL134530, AL134519, AL119391, |
| | | | | | AL119319, AL119418, AW372827, U46350, |
| | | | | | AW363220, AW384394, AL119522, Z99396, |
| | | | | | AL119497, AL119363, AL119355, U46349, |
| | | | | | AL119444, U46341, AL037205, AL119483, |
| | | | | | AL119396, AL119401, AL119341, AL119464, |
| | | | | | AL134525, AL043003, U46346, AL119335, |
| | | | | | AL134528, AL119496, AL134538, U46345, |
| | | | | | AL043019, AI142132, AL042542, AL042614, |
| | | | | | AL042450, AL042984, AL042965, AL042975, |
| | | | | | AL043029, AL042551, AL122084, AL049611, |
| | | | | | AB026436, AR060234, AR066494, |
| | | | | | AR054110, A81671, AR043113, AR069079, |
| | | | | | and AW612030. |
| HKGDE58 | 62 | 1125264 | 1-1332 | 15-1346 | AW271462, AA582539, AI963340, AI097093, |
| | | | | | AI460219, AA286856, AI761614, AI149781, |
| | | | | | AI032670, AI819154, AI089302, AI636161, |
| | | | | | AA448686, H12042, AI811219, AA287162, |
| | | | | | AA836993, T95010, AI001803, AA904906, |
| | | | | | AA743196, AI015200, R37000, H05308, |
| | | | | | AA453607, F05000, AA578803, AI241466, |
| | | | | | AI033193, F03322, AA037601, AA330970, |
| | | | | | F01968, R13858, H12041, T75492, Z46111, |
| | | | | | F07044, T94956, H05358, N47542, |
| | | | | | AA053290, AW183219, T75535, AA454139, |
| | | | | | F05720, AI288171, AA651907, AA054759, |
| | | | | | F01965, F05717, AL122084, and AL049611. |
| HCHMW40 | 63 | 1129560 | 1-906 | 15-920 | AI732539, AI791495, AI791325, AA709067, |
| | | | | | AW082062, AI791964, AI732667, AA505923, |
| | | | | | AW057561, AI909857, AI909862, AA601601, |
| | | | | | AI909853, AW151270, AI597748, AA938181, |
| | | | | | AA079317, AI017427, AI285826, AI473547, |
| | | | | | AA689584, AL036241, AI251221, AI571699, |
| | | | | | AA836392, AI624279, AI343091, AW403717, |
| | | | | | AI624304, AI366992, AI310332, AW193299, |
| | | | | | AI289436, AI499325, AI289791, AA764900, |
| | | | | | AI590755, AA860080, AI866127, AI860897, |
| | | | | | AI744256, AA713657, AI440238, AA427700, |
| | | | | | AI378123, AW021662, AI619754, AA713781, |
| | | | | | AW090387, AI702343, AI344819, AF094480, |
| | | | | | I28326, AF106657, A20553, L12407, |
| | | | | | AF007142, AF076633, AL133016, AF100781, |
| | | | | | A26498, A27631, AF090900, AR055519, |
| | | | | | AF028823, AL137298, A44314, U78525, |
| | | | | | I29004, X66417, AL080060, A23630, |
| | | | | | M19658, and E13998. |
| HE8QZ34 | 64 | 1086807 | 1-1070 | 15-1084 | R35313, AA210809, W28575, AA112126, |
| | | | | | R86156, AA286753, AW405566, AA385668, |
| | | | | | AA384297, H25863, H50786, R25032, |
| | | | | | Z46079, AA334931, AA490204, and |
| | | | | | AW367213. |
| HE8TM80 | 65 | 1185770 | 1-1438 | 15-1452 | AW368592, AL040968, AW390796, |
| | | | | | AW361341, AA125853, AW361336, R56714, |
| | | | | | AW368596, AA127005, AA436573, |
| | | | | | AI610191, AL040878, H53723, AW386767, |
| | | | | | R72151, AA662674, H06566, AI620201, |
| | | | | | AW272525, AA428869, AA876119, |
| | | | | | AA643689, AI810630, T70821, AA126031, |
| | | | | | AI242268, AI525912, AI624158, AA715437, |
| | | | | | AI139291, AA506178, AA366775, |
| | | | | | AW295598, AA071351, AI635219, AI628041, |
| | | | | | AA126626, AI223312, AI831145, AW272772, |
| | | | | | AA223723, AI393334, AA101504, AA125839, |
| | | | | | AA609710, AA166669, AA969727, |
| | | | | | AA813942, AA627552, AA588589, |
| | | | | | AA569083, T70552, AI520735, AI654578, |
| | | | | | AW173734, AW245101, AI128760, |
| | | | | | AI589990, AA436546, AW377757, |
| | | | | | AA653217, AA909871, N25030, H98122, |
| | | | | | AA706136, AA182573, AI612136, AI612151, |
| | | | | | AW301938, AW074868, AI308036, |
| | | | | | AA281089, H84055, H29320, T90829, |
| | | | | | H06511, AW338571, AW292509, R56868, |
| | | | | | AI474847, AI682762, AW028456, AA307834, |
| | | | | | AA969587, R10267, and AF191018. |
| HHEFL55 | 66 | 957539 | 1-1273 | 15-1287 | AW411262, AW239479, AA306419, C75208, |
| | | | | | AA311414, H06122, W38676, AA297279, |
| | | | | | T50005, AA302953, AW192348, AA334000, |
| | | | | | AA151050, AW383613, AW383609, |
| | | | | | AW383535, AA226372, and AA938031. |
| HWLEY40 | 67 | 1172021 | 1-1422 | 15-1436 | AI014538, AW006457, AI479414, AI805243, |
| | | | | | AI129301, AI401170, AI290929, AI872459, |
| | | | | | AI601146, AI708870, W28953, AI973043, |
| | | | | | AI540074, AI682389, AI810108, AI392777, |
| | | | | | AI186894, AA460832, AA405714, AA649837, |
| | | | | | H10122, AW294364, AA313257, AI654747, |
| | | | | | AI358510, AI540589, AA954900, H19139, |
| | | | | | AA991687, H08285, AW408231, AI953865, |
| | | | | | AA371650, AI356090, AW009738, R54508, |
| | | | | | AA977875, R59784, AW407594, F07194, |
| | | | | | F08180, F08505, Z43765, AA489470, R54477, |
| | | | | | AA627570, R52605, AW297100, F07185, |
| | | | | | AA724308, AW407965, AA778454, R08582, |
| | | | | | F05493, AA504833, R43473, AI698394, |
| | | | | | AA765208, R13670, H08185, Z45409, |
| | | | | | AW190678, Z39824, AA461135, H19140, |
| | | | | | AW131981, R13641, AA701889, AA159318, |
| | | | | | AA404221, H84256, AI475002, AW189730, |
| | | | | | AA405779, F01761, H84262, AA404687, |
| | | | | | Z41120, F03843, F04422, R61326, H29188, |
| | | | | | AA749407, AA581151, AA477301, |
| | | | | | AA502309, R54409, AA477302, AI144326, |
| | | | | | and Z41744. |
| HHAWC08 | 68 | 1088146 | 1-461 | 15-475 | H06763, F13201, T75396, N41533, |
| | | | | | AA310599, N26380, AW403968, AW247011, |
| | | | | | W07220, N43834, N44897, AA322203, |
| | | | | | N25010, and AR009648. |
| HCEHD66 | 69 | 959160 | 1-1311 | 15-1325 | AI968437, AI824971, AW104052, AI762197, |
| | | | | | AI598138, AI088543, AI492390, AI827280, |
| | | | | | AA058923, AW007187, AW135225, |
| | | | | | AI391466, AI808139, AA534403, AW028554, |
| | | | | | AI369729, AA460467, AA135928, |
| | | | | | AW006062, AW138526, AA507443, |
| | | | | | AI479413, AI400940, AW137272, |
| | | | | | AW381735, AA135929, AA085774, W81153, |
| | | | | | AA918755, C03738, R85039, AI472852, |
| | | | | | AI937792, AI867512, AA599118, N62215, |
| | | | | | AI864402, H41491, N62216, D44882, |
| | | | | | H14329, W30972, H40979, AA463408, |
| | | | | | AI744140, H40980, N62166, AA319197, |
| | | | | | AI766568, N62223, AF186409, AF020184, |
| | | | | | L27421, L27420, and AC006241. |
| HMSGF27 | 70 | 1206683 | 1-1566 | 15-1580 | AI191318, AI978812, AA586860, AI628509, |
| | | | | | AA805184, W73797, AI582366, W73745, |
| | | | | | AW239293, AI620297, AW083832, |
| | | | | | AW386876, AI056600, AI056739, AI362766, |
| | | | | | AI494212, AI077551, AA935678, AI348675, |
| | | | | | AI358232, AA251769, AA968828, AA659758, |
| | | | | | AI891139, C06060, R67182, AA746268, |
| | | | | | AA251926, AA506524, H58621, D81244, |
| | | | | | AA291462, H58622, AW193598, AI919497, |
| | | | | | AI250032, AA604444, AI567397, AA905208, |
| | | | | | AA836253, R57498, AI525934, AA551675, |
| | | | | | AI364618, AI421662, AW080157, |
| | | | | | AW087829, AI813914, R38144, AW166086, |
| | | | | | AI680498, AI523628, R59996, AI554821, |
| | | | | | AI874261, AL045413, AI469754, AI366900, |
| | | | | | AW262491, AI540179, AI560545, |
| | | | | | AW262042, AI954504, AI089970, AI677646, |
| | | | | | AL043152, AI679164, AI431909, AI868204, |
| | | | | | AI453328, AI538085, AI680221, AW089006, |
| | | | | | AI056328, AI470293, AI567302, AW162194, |
| | | | | | AI799199, AI690748, AI921746, AA741027, |
| | | | | | AI553926, AI582871, AI805671, AI280747, |
| | | | | | AI536563, AI687134, AA514684, AI184903, |
| | | | | | AI610667, AI609409, AW089932, AI812107, |
| | | | | | AW020381, AI355277, AW148876, |
| | | | | | AI564426, AI628015, AL037454, AI648458, |
| | | | | | AW079572, AI891084, AI375702, AI865906, |
| | | | | | AI818353, AI950688, AI439745, AI783569, |
| | | | | | AI801152, AW080346, AI673278, AL042191, |
| | | | | | AI538908, AI863382, AA848053, AI633125, |
| | | | | | AI520785, AL037104, AI698391, AW160905, |
| | | | | | AI538850, AI520862, AI917963, AI432570, |
| | | | | | AW151136, AI624548, AI918435, AI702527, |
| | | | | | AI499890, AI818562, AI623941, AW149869, |
| | | | | | AI469532, AI336575, AI961286, AI249946, |
| | | | | | AI345688, AL037081, AI581139, AI889213, |
| | | | | | AI824557, AA808175, AI623179, AW074605, |
| | | | | | AI890391, AW084447, AI453767, AI524179, |
| | | | | | AI287326, AI587114, AW169653, |
| | | | | | AW104641, AI886206, AI499131, AI368579, |
| | | | | | AI819663, AW082532, AW090102, |
| | | | | | AI866127, AI374987, AI498067, AI744243, |
| | | | | | AI802244, AI798456, AI826941, AI801592, |
| | | | | | AI520809, AI436438, AI872154, AI203903, |
| | | | | | AI921479, AI249877, AI922996, AI583578, |
| | | | | | AW189332, AI590423, AI524654, AL040011, |
| | | | | | AI309769, AW152415, AI633061, |
| | | | | | AW088591, AW301344, N25033, AL118781, |
| | | | | | AI890223, AI247193, AI887620, AW160916, |
| | | | | | AA868961, AW129616, AW151785, |
| | | | | | AA916133, AI684021, AI635032, AI916419, |
| | | | | | W45039, AI691131, AA911767, AI433611, |
| | | | | | AI345415, AW025279, AI564290, |
| | | | | | AW085639, AI816292, AI610690, AI690813, |
| | | | | | AI687424, AW132001, AI677796, |
| | | | | | AW118553, AI564723, AI624529, AI620075, |
| | | | | | AI619631, AW104724, AI473451, AI972070, |
| | | | | | AI564719, AI950729, AI624604, AA857847, |
| | | | | | AW263796, AI589428, AI866469, |
| | | | | | AW118518, AW089387, AI798373, |
| | | | | | AA693331, AI445611, AI697372, AI359787, |
| | | | | | AI696398, AW088628, AI572017, AI921464, |
| | | | | | AW129456, AI758694, AI573032, AI922707, |
| | | | | | AI696714, AI491852, AW190042, |
| | | | | | AW166870, AI921633, AW089844, |
| | | | | | AI474107, AW169234, AI927233, AF086313, |
| | | | | | AF090900, AL137530, AF111851, AF200464, |
| | | | | | AF102578, AF090934, U02475, AF159615, |
| | | | | | AB025103, Z13966, X79812, I33392, |
| | | | | | AL049314, A77033, A77035, AF139986, |
| | | | | | AL080140, S36676, A65340, AF038847, |
| | | | | | AF100931, AF069506, I32738, AL137523, |
| | | | | | AF141289, AF061795, AF151685, A21625, |
| | | | | | AF113019, X80340, AL137271, E01314, |
| | | | | | U35846, AL137292, A32826, A32827, I89947, |
| | | | | | AL133084, AC002471, AC005374, I48978, |
| | | | | | AL133070, AL050149, S78453, AF113677, |
| | | | | | AL137284, AF081197, AF081195, AF182215, |
| | | | | | AL133640, X84990, AB007812, AF076464, |
| | | | | | A07588, AL080124, AL136884, X62580, |
| | | | | | AL133062, AL080126, AL117435, A58524, |
| | | | | | A58523, A08907, U86379, AF094480, |
| | | | | | AF114784, AL137529, AL137711, S77771, |
| | | | | | AF044323, AF106657, U72621, AL137294, |
| | | | | | S54890, A30330, A30331, Y10655, I68732, |
| | | | | | AL035587, AF117657, AF061981, AR068466, |
| | | | | | AF031147, AF036941, AR029580, AL133075, |
| | | | | | AL137558, A12297, A03736, A08910, |
| | | | | | L04859, X97332, A08909, AF067728, |
| | | | | | X65873, AL137550, AL049996, A08908, |
| | | | | | AF115392, U58996, AL117416, AF017152, |
| | | | | | Z37987, AL110221, AL122045, AL133047, |
| | | | | | AF032666, AF026008, A18777, AL122110, |
| | | | | | AL133067, AL049382, A08913, AL137459, |
| | | | | | AF047716, AF195092, AL050143, AL137547, |
| | | | | | AR038854, AL117648, X82434, L10353, |
| | | | | | U70981, AF026124, A08912, AL096751, |
| | | | | | AL133061, AF078844, U92992, AF119336, |
| | | | | | AF145233, A65341, AL117587, AF114818, |
| | | | | | AF079763, U73682, AL137660, U58653, |
| | | | | | AL137479, A08911, AF169154, I89931, |
| | | | | | X99257, AF051325, Y13350, U90884, |
| | | | | | E15582, AF111849, AL137554, AL122098, |
| | | | | | AF000301, AL080162, AL050116, AL137533, |
| | | | | | AL133049, S76508, AF106862, Z97214, |
| | | | | | X72889, AR022283, L24896, AF167995, |
| | | | | | I49625, L13297, X60786, AL034417, Z82022, |
| | | | | | AL137538, AL122100, AF090886, AL137256, |
| | | | | | AF084644, AF039138, AF039137, AF084645, |
| | | | | | AF030513, AR034821, AL137480, AF019298, |
| | | | | | AL050366, AL022315, AL137478, AL133088, |
| | | | | | AL137560, E12580, AL080110, AR059958, |
| | | | | | S82852, A91160, M27260, AL080150, |
| | | | | | AL050138, A91162, U49908, AL133623, |
| | | | | | AL096728, I89934, A15345, AR020905, |
| | | | | | AL133637, A86558, AL122050, AL122104, |
| | | | | | AL080234, AF118558, AF199027, U57352, |
| | | | | | AF090901, AF137367, U72620, AL137627, |
| | | | | | AF118094, AL080159, AF118090, AL117443, |
| | | | | | X72387, AL122123, X53587, AL133665, |
| | | | | | AC007056, X81464, AF022813, S61953, |
| | | | | | A57389, X66871, AL050277, AC002464, |
| | | | | | E03671, E02349, AL117460, AL137574, |
| | | | | | I09499, AL080148, AL110228, I48979, |
| | | | | | AF077051, AR016469, AB019565, X98066, |
| | | | | | AL049339, X87582, U67958, A83556, I46765, |
| | | | | | X55446, AF126488, AF112208, and |
| | | | | | AJ003118. |
| HBGMG39 | 71 | 971414 | 1-471 | 15-485 | AA024454, AA024670, AI458409, AI740930, |
| | | | | | AI742565, AI743686, AI066465, AI168481, |
| | | | | | AI379125, AI569972, AW069135, AI497641, |
| | | | | | AW192429, AW084071, AW339039, |
| | | | | | AW102701, AI061450, AI693756, AI991329, |
| | | | | | AW003414, AI342244, AI870883, |
| | | | | | AW007899, AI609020, AI453165, AI248142, |
| | | | | | AI129686, AI992036, AI761292, AI623708, |
| | | | | | AI864435, AW151858, AI362058, |
| | | | | | AW044270, AI378430, AW008808, |
| | | | | | AI479128, AL036585, AI923881, AI963067, |
| | | | | | AI740972, AL045227, AI351617, AI334039, |
| | | | | | AI452903, AI700412, AI475537, AI469546, |
| | | | | | AI187911, AI066744, AI190677, AI812069, |
| | | | | | AI081231, AI050026, AI890929, AA551905, |
| | | | | | AI080156, AI554840, AW073739, AI926062, |
| | | | | | AA577674, AW190499, AW250073, |
| | | | | | AI524714, AI884727, AW168902, AI096904, |
| | | | | | AI369151, AI858574, AI422058, AA304774, |
| | | | | | AI890721, AI052823, AI683215, AI087154, |
| | | | | | AA682804, AW080685, AW004991, |
| | | | | | AA912478, AW079985, AA054275, |
| | | | | | AA461453, AI668789, AA970861, AA010790, |
| | | | | | AW085591, AI819302, AI217784, AI017023, |
| | | | | | AI584163, AI627434, AA709077, AA984939, |
| | | | | | AA446048, AI564659, AI000961, AI095374, |
| | | | | | AI581899, AA532435, AA864689, |
| | | | | | AW087352, AW057507, AW132118, |
| | | | | | AA744639, N53410, AA969103, AA918799, |
| | | | | | AA862362, AI672825, AA779825, AA931463, |
| | | | | | AI193638, AW191953, N20167, AI569968, |
| | | | | | AW150032, AA612750, AI619904, |
| | | | | | AA429899, W02113, AA969104, W48745, |
| | | | | | AA827905, AW190663, AA780072, N50640, |
| | | | | | AA533847, W32574, AI640737, AI587533, |
| | | | | | AW182184, AI933617, AW073566, |
| | | | | | AI469425, AL041483, AA765028, AI952283, |
| | | | | | AI961508, AI095341, AA937508, N48059, |
| | | | | | AA228075, AI869852, N78603, AA485535, |
| | | | | | AA506502, AA877348, AA252354, |
| | | | | | AA010101, AA011219, I23065, AW444850, |
| | | | | | AI917215, AA506948, AW297832, |
| | | | | | AW204879, N53257, AI917614, AI167689, |
| | | | | | AI937775, AI858564, AW043696, |
| | | | | | AW168023, AI263865, AI885655, AA450098, |
| | | | | | AW139189, AA883859, E12258, AF153686, |
| | | | | | E12259, E12260, and AL390719. |
| HTTCT34 | 72 | 1097598 | 1-623 | 15-637 | C75208, AA311414, AW411262, H06122, |
| | | | | | W38676, AA334000, AA297279, T50005, |
| | | | | | AA302953, AW383613, AW383609, |
| | | | | | AW192348, AW239479, AW383535, and |
| | | | | | AA151050. |
| HAWAM69 | 73 | 943104 | 1-1901 | 15-1915 | AA430300, AA541688, AA776700, |
| | | | | | AW385785, AA679037, AA573270, |
| | | | | | AA126614, AL045796, AA682186, AI268236, |
| | | | | | AI963606, AW192904, AI926591, AI924827, |
| | | | | | AI922590, AI032288, AI375804, AA705172, |
| | | | | | AW081541, AA694514, AI130883, N25288, |
| | | | | | AA931725, AI800450, AI270687, AI366906, |
| | | | | | AW058362, AI683319, AA436891, W69578, |
| | | | | | AI597744, AI446542, R59176, AW453004, |
| | | | | | AI911821, AA687634, AI095665, AI130013, |
| | | | | | W69579, AA722782, AI191864, AI587015, |
| | | | | | AA398533, AA676733, AI476374, AA115447, |
| | | | | | AA554327, AA759328, AW242281, |
| | | | | | AA042956, AI139766, AA135916, AA886732, |
| | | | | | AA664356, AA358590, H71919, AI565897, |
| | | | | | AW304844, AA916086, AA618576, |
| | | | | | AA363371, Z44808, AA430199, AI370031, |
| | | | | | AA320329, AA393105, AW452852, |
| | | | | | AA135927, AI004140, AA135926, AA042816, |
| | | | | | H44791, T35731, AI865731, AA813424, |
| | | | | | R42647, R27785, T32691, AI934183, |
| | | | | | AA115446, AI857286, AW008428, AI631988, |
| | | | | | AA678468, AW075384, H44790, AI569918, |
| | | | | | AI918635, AA603858, AA601518, AI745618, |
| | | | | | H42641, AI445766, R27874, AI939990, |
| | | | | | AA677131, AW364938, AI569374, |
| | | | | | AW029062, C01947, and AA732827 |
| HMTAV95 | 74 | 614936 | 1-395 | 15-409 | AB023187, AL137000, AL137000, and |
| | | | | | AL137000. |
| HSXCB49 | 75 | 1172424 | 1-684 | 15-698 | |
| HTEON29 | 76 | 1126522 | 1-1190 | 15-1204 | AW004028, AI968030, AW237673, |
| | | | | | AA432290, AI143780, AW138422, |
| | | | | | AA428635, AA112090, AI143791, and |
| | | | | | AA861634 |
| HHFGP83 | 77 | 1174826 | 1-2635 | 15-2649 | AW027467, AW021001, AI679358, |
| | | | | | AA628405, AW002474, AA142868, |
| | | | | | AI720221, AI559580, AI952940, AI971163, |
| | | | | | AA126704, AW189486, AI086066, AI338366, |
| | | | | | AI632310, AW089385, W92463, AI372019, |
| | | | | | AI335800, N67118, AW130513, AI339087, |
| | | | | | W72626, AI962685, AI811098, AA043282, |
| | | | | | AI268440, AA054560, AI564240, AI623726, |
| | | | | | AA748136, AA012896, AA716090, |
| | | | | | AA047297, AA652890, AI869611, AI199091, |
| | | | | | AA938386, AA708870, AA760924, |
| | | | | | AA043925, AA582637, AA056075, |
| | | | | | AA017551, AI202160, AI916439, AA618223, |
| | | | | | AA632478, AA975496, AA249580, AI422146, |
| | | | | | AA932810, AA628573, AA628559, |
| | | | | | AW195978, D81448, AW188932, AI857354, |
| | | | | | AI914554, AW193055, AA046731, R75666, |
| | | | | | AI873760, AI127156, AW023470, AA043406, |
| | | | | | AW023472, AI690518, AA043200, |
| | | | | | AA054620, AA468866, AW382445, |
| | | | | | AA047158, C01055, W76609, AA043281, |
| | | | | | AI918561, AI570316, AA338995, AI653300, |
| | | | | | AI917733, W27493, AL133599, AP004840, |
| | | | | | and AF090866. |
| HTEKS20 | 78 | 1123458 | 1-1063 | 15-1077 | AI936596, AA868353, AI797296, AA725553, |
| | | | | | AI221970, AA428462, AA429551, AA431190, |
| | | | | | AA629305, AA629047, AI073397, |
| | | | | | AW235895, AI123443, AI808267, AA609412, |
| | | | | | AI914363, AA953895, AI214385, AA431516, |
| | | | | | AA911681, AA781953, AI825106, AA298758, |
| | | | | | AI215028, AA909534, AA723768, D10393, |
| | | | | | and S63991 |
| HCHAT01 | 79 | 1202214 | 1-3835 | 15-3849 | AI357645, AW372245, AW372243, |
| | | | | | AI870876, AL079756, W80383, AA143521, |
| | | | | | AI934507, AI497785, AA131786, AA143522, |
| | | | | | AA775429, N73794, AI190675, AA570709, |
| | | | | | AL041943, AW026848, AA746031, |
| | | | | | AI950978, AI422318, AA131772, AI885729, |
| | | | | | AW026326, AA635171, AA934699, |
| | | | | | AA316540, AI246491, AI160357, AA487855, |
| | | | | | AI041954, H11648, AI660052, AW152198, |
| | | | | | AI285004, AW028295, AI561088, |
| | | | | | AW166539, AI635148, AI094048, |
| | | | | | AW072627, AA464017, N24219, AA458881, |
| | | | | | AI094041, AI092047, AA464078, AA588471, |
| | | | | | AI804530, AI348338, AA487856, H99677, |
| | | | | | AI186100, H99573, AI025641, AA909894, |
| | | | | | N32879, AI081468, AW273806, AA872312, |
| | | | | | W78982, AA740804, M78765, AW337818, |
| | | | | | AI160858, AA977238, AA627981, AA985314, |
| | | | | | AA653069, AI610235, AI288191, AA492020, |
| | | | | | AI937558, AI357858, AW273022, H23489, |
| | | | | | N28433, AA018338, AW050885, AW365055, |
| | | | | | W01009, AI494441, AA348323, AA953253, |
| | | | | | AA484024, H30484, AA459071, AW025210, |
| | | | | | H90615, H90519, AA732761, F10250, |
| | | | | | N41828, AW117618, AW024678, AW079303, |
| | | | | | N47599, AA150812, Z41805, Z46179, |
| | | | | | AA864205, AA463943, D51145, AA464727, |
| | | | | | H12176, C16600, AA641974, I31584, |
| | | | | | AI886471, N73825, R08891, N45481, H20834, |
| | | | | | AI270409, F12634, AI991925, AA976247, |
| | | | | | R09511, N76390, N68976, AA342119, |
| | | | | | R43266, AI802239, T90454, T78049, |
| | | | | | AI648496, AI001885, T31949, AI468389, |
| | | | | | AA046221, R43775, AA740939, AI655751, |
| | | | | | AA477480, AW139948, T31978, R17167, |
| | | | | | AA496370, R43146, R09622, R25017, |
| | | | | | AA496647, AA319007, AA348324, T35092, |
| | | | | | H46223, H61245, AA046114, R08999, |
| | | | | | R09784, AW071171, N99421, AI085437, |
| | | | | | H61246, N84366, AA641917, AA648218, |
| | | | | | AA342120, T27314, AI042591, AB014576, |
| | | | | | AA872361, AW517691, AW591480, and |
| | | | | | AW614740. |
| HAPNZ77 | 80 | 1171962 | 1-1522 | 15-1536 | AI829331, AI307338, AA831880, AI379982, |
| | | | | | AA768459, AW270258, AW271904, |
| | | | | | AI345157, AI431303, AL042756, AI755214, |
| | | | | | AA584489, AW265385, AI354423, AI963720, |
| | | | | | AL038936, AL040054, AI754105, AW021917, |
| | | | | | AI754567, AI733856, AW419389, AA402129, |
| | | | | | AW419262, AA680243, AA410788, |
| | | | | | AA634837, AI613459, AI926728, AW023672, |
| | | | | | AL041894, AI625604, AI282253, AA455483, |
| | | | | | AW327868, AW193265, AW069227, |
| | | | | | AA574442, AI064864, AA521323, AI244127, |
| | | | | | AA629992, AL046409, AI284640, |
| | | | | | AW327624, T05834, AI192631, AL048626, |
| | | | | | AI054333, AI305766, AI613280, AA013168, |
| | | | | | AI962030, AI732120, AW075979, AA630854, |
| | | | | | AI753488, AA521399, AL079734, AA659832, |
| | | | | | AA019973, AI061313, AI336054, AI885572, |
| | | | | | AW270256, AA644090, H05940, AI799607, |
| | | | | | AA613627, AL118991, AI345654, AI587583, |
| | | | | | AA526625, AI291823, AI587565, AI003611, |
| | | | | | AI754767, AW166611, AA533176, |
| | | | | | AW020088, AA833875, AA833896, |
| | | | | | AA176605, AI332615, AI675615, AI039809, |
| | | | | | AW157456, AA526326, AW275432, |
| | | | | | AW162697, AW007759, AA857486, |
| | | | | | AW023111, AI279417, AL046746, AL037683, |
| | | | | | AA634786, AI306232, AI017251, AW303196, |
| | | | | | AA864603, AI307201, AI457397, T49633, |
| | | | | | AI251104, AI290405, AA502991, AA904275, |
| | | | | | AI753113, AA491814, AW062724, |
| | | | | | AW439558, AA226584, AW301350, |
| | | | | | AI696793, AW274191, AW190505, |
| | | | | | AI133102, AL041706, AI867058, AW274349, |
| | | | | | AA904137, AI888468, AA513851, |
| | | | | | AW302903, AI270117, AA613227, AI016704, |
| | | | | | AI570943, AI377413, AW022934, AI110770, |
| | | | | | AW131457, AA262752, AI224583, |
| | | | | | AA491284, D58782, AA779783, AW021583, |
| | | | | | AW304584, AI564185, AI272052, |
| | | | | | AW410354, H68343, AI890348, AL133668, |
| | | | | | AA394271, AA610509, AI040051, |
| | | | | | AW082117, AW117740, AI366555, |
| | | | | | AA086318, AI090334, AI870197, AW021161, |
| | | | | | AA908687, AI696962, AC005859, AC003046, |
| | | | | | AL096791, AC005783, AC005939, |
| | | | | | AC003030, U73023, AC007312, AC005502, |
| | | | | | AC004841, AP000503, AC006001, AF053356, |
| | | | | | AC004417, AL109798, AC004590, |
| | | | | | AL139054, AL022329, AC004837, |
| | | | | | AC003971, AC003958, AL022476, |
| | | | | | AC006249, Z85987, I51997, AF134726, |
| | | | | | AC006115, AC005701, AF146191, |
| | | | | | AC005037, AC009509, AL078581, L44140, |
| | | | | | AC005225, AC008078, AC012627, |
| | | | | | AL121595, Z75888, Z46936, AC007277, |
| | | | | | X53550, U57005, AP000697, AC007447, |
| | | | | | X55925, AC005211, X54177, AL021579, |
| | | | | | U80017, X54178, Z75887, AC004895, |
| | | | | | AL022322, AC004139, AL035461, AL049636, |
| | | | | | AF111169, AF109907, AP000501, AC005102, |
| | | | | | AL109627, Z98941, AC005251, AC010206, |
| | | | | | M37551, AC005490, U18392, U07561, |
| | | | | | AC012085, Z73963, U18387, AC006442, |
| | | | | | AC007686, AC007999, U02532, AF077058, |
| | | | | | AL121603, AC007731, AL049699, |
| | | | | | AC006511, AC007204, AC006088, |
| | | | | | AL035468, AL024507, AC005224, |
| | | | | | AC008115, AC005833, AC005630, |
| | | | | | AC004854, AL024498, AC006271, |
| | | | | | AL008627, AF064861, AC006948, AC004985, |
| | | | | | AC007685, AC007376, U02531, AC005829, |
| | | | | | Z73358, L31848, AL031652, AL135744, |
| | | | | | AF015147, AL079339, AC004002, U47924, |
| | | | | | AL034420, AC002470, AC004655, Z98946, |
| | | | | | AL110502, AC007536, AL132987, |
| | | | | | AC007030, AC005500, AC003107, |
| | | | | | AP000210, AP000132, AC002504, AC006064, |
| | | | | | AC006006, U57006, AC005800, AC000118, |
| | | | | | AC005049, AC005772, AL049869, |
| | | | | | AC006251, AF015157, AC006388, AF149774, |
| | | | | | AL023807, AL080276, AL121655, AC005899, |
| | | | | | Z82244, AC005821, X54176, Z82182, |
| | | | | | AC000082, AC005015, AJ003147, AC008394, |
| | | | | | AC004477, AC002115, AL031228, |
| | | | | | AL049757, Z99943, AL021155, Z84469, |
| | | | | | AF088219, AC005206, AC002558, |
| | | | | | AC004876, AL096802, AP000359, AP000354, |
| | | | | | D83989, AF117829, AC007461, AC005013, |
| | | | | | Z99715, AC007055, L77570, AC004240, |
| | | | | | AC004686, AC005874, AF134471, |
| | | | | | AC005214, AF191544, AL050341, AC005005, |
| | | | | | AC012599, AC005756, AC008372, |
| | | | | | AC005379, AC004253, AC002119, |
| | | | | | AC007226, AC008041, AC006027, |
| | | | | | AC004878, U57008, AL024509, AC004408, |
| | | | | | AF196779, AD000092, AC006536, |
| | | | | | AL022401, AL133245, AC005667, Z93017, |
| | | | | | AC004821, AC008009, AC004106, |
| | | | | | AL049759, AC007298, AL035587, AF196969, |
| | | | | | AF036405, AL031666, AC005901, AC004019, |
| | | | | | AF165142, AC004458, AL078477, Z81370, |
| | | | | | AL132718, AC002094, AL049540, AF160252, |
| | | | | | Z69667, AC009275, AC000029, AC006367, |
| | | | | | AL021918, AC004859, AC005480, |
| | | | | | AC005239, AL031433, AC002430, |
| | | | | | AL034429, U62317, AC005751, Z80232, |
| | | | | | AC005678, AC007546, AL121653, |
| | | | | | AC007384, AC005696, AC006600, |
| | | | | | AL021393, AL136295, AC002492, Z83826, |
| | | | | | AL022726, AF003626, X55931, AL021917, |
| | | | | | AC005089, AC004087, U67801, AC004992, |
| | | | | | AL022311, and AL034418. |
| HSIAO78 | 81 | 1222343 | 1-1988 | 15-2002 | AA527435, AW195324, AI653000, |
| | | | | | AW051613, AA514619, AI675204, AI652532, |
| | | | | | AA435717, AI659333, AI796596, AI273289, |
| | | | | | AI880669, AI826786, AA889355, AI174916, |
| | | | | | AW004627, AA377072, AA255838, |
| | | | | | AA397980, AA430523, AI565825, AI435476, |
| | | | | | AW001866, N52904, AA430608, AI760594, |
| | | | | | AA298640, W69756, AA594479, AI149418, |
| | | | | | AI911011, AI871818, N71537, AI089421, |
| | | | | | AA400874, AI038591, AA854839, AI565867, |
| | | | | | AI131012, AI144119, H65663, AW044396, |
| | | | | | N47230, AI732273, AW079534, AA847967, |
| | | | | | AW027678, AL044698, AA224892, T36269, |
| | | | | | AA009702, AI668849, AW182206, |
| | | | | | AA011130, N78511, AI676028, AA968449, |
| | | | | | AI984040, AA207018, AA658246, N73670, |
| | | | | | AI937659, R53598, AA453038, AA904224, |
| | | | | | AW293549, R48261, AA775033, H52314, |
| | | | | | R38289, H48428, AW083969, AA588654, |
| | | | | | F10880, AA578060, AW298073, W25831, |
| | | | | | AA889378, AA483944, AC002302, X62260, |
| | | | | | AC002288, AL035588, AC007425, AF181896, |
| | | | | | AC004216, AP000280, AP000038, AF003528, |
| | | | | | AL033525, AC009498, AC007676, AP000107, |
| | | | | | AC006080, AC005704, AC005332, |
| | | | | | AC005011, AL022328, AL118497, |
| | | | | | AC007221, AC005213, AL132987, U69570, |
| | | | | | Z48484, AB020858, AC004382, AL049753, |
| | | | | | AC004874, AC006023, AC003976, |
| | | | | | AL035668, AL035671, AL139165, K03021, |
| | | | | | AC005771, AC004894, D83402, AC005004, |
| | | | | | AC005183, AC004129, AC004671, |
| | | | | | AC006354, AC005046, AC005161, |
| | | | | | AL117338, AC005184, AC006599, AF042484, |
| | | | | | AC004100, AJ006345, AC005235, AC004875, |
| | | | | | AC003693, AC004982, AL021877, |
| | | | | | AL009183, AC002546, Z83822, Z75741, |
| | | | | | AC002541, AC004098, U61375, AC007637, |
| | | | | | AC004061, AC005922, AL049821, Z95114, |
| | | | | | AC006952, AC007529, AF095703, AL021395, |
| | | | | | AL080286, AL035696, AL117436, AC006973, |
| | | | | | Z82246, AP000466, AL078638, AC007680, |
| | | | | | Z84484, AP000030, AL035663, AP000252, |
| | | | | | AC011605, AL035427, AC012088, Z86062, |
| | | | | | AC000378, AL035106, AL117375, |
| | | | | | AC004984, AF001550, AC006360, AP000134, |
| | | | | | AP000212, AC007392, AL022159, Z96074, |
| | | | | | AC011594, AC004530, AC008012, |
| | | | | | AL132718, AC005060, AC007543, |
| | | | | | AC004015, AC008069, AL133162, AF001548, |
| | | | | | AL031390, AL135746, AC009263, |
| | | | | | AB014079, AC007156, AC007198, |
| | | | | | AC004889, AL031123, AP000228, AL024508, |
| | | | | | AP000140, Z68324, AP000146, AC005533, |
| | | | | | AL035633, AL031737, AC000119, |
| | | | | | AC004838, AC004616, AC007450, |
| | | | | | AP000088, AC005086, AC006398, |
| | | | | | AC006511, AC009275, AC004055, |
| | | | | | AC004882, AL021707, AC002563, AP000299, |
| | | | | | AC006139, AC005553, AF047825, Z97876, |
| | | | | | Z84480, AL020989, AP000514, AC004888, |
| | | | | | AC007314, AB020865, AL117347, |
| | | | | | AC006367, AC005562, AP000045, AP000113, |
| | | | | | AC005393, AC005690, AL049839, |
| | | | | | AL034425, AC007617, Z75957, AC005529, |
| | | | | | AC005701, U95740, AF152365, AC012083, |
| | | | | | AL021407, AC000072, AC011700, |
| | | | | | AL031120, AC005538, L77569, AC004381, |
| | | | | | AL109914, AL008635, AC009464, AL031056, |
| | | | | | U91319, AL110120, AC007455, AL022329, |
| | | | | | Z84488, AL035072, AC006213, AL022162, |
| | | | | | AC006196, AL118512, AL023806, AP000536, |
| | | | | | AL121866, AC005587, AL033384, |
| | | | | | AC006998, AC007262, AF107258, AL034555, |
| | | | | | AL021451, AC006064, AL050350, Z74409, |
| | | | | | and AC004968. |
| HWBEG18 | 82 | 909798 | 1-940 | 15-954 | AA906863, AW408789, AW452373, |
| | | | | | AA352977, AA732349, AI269653, AI492098, |
| | | | | | and AB020653. |
| HFCBB56 | 83 | 1204322 | 1-2090 | 15-2104 | AA491955, AA053463, AI620992, |
| | | | | | AW005974, F13749, AW408767, AA864271, |
| | | | | | AW162288, AA565232, AA501867, |
| | | | | | AW265688, AI493583, AA744094, |
| | | | | | AA904211, AW316599, AI224619, |
| | | | | | AA019542, AA339423, AI696793, AA878492, |
| | | | | | AW081610, AI492579, AI623364, AI445373, |
| | | | | | AA630535, AA513983, AI243793, AI889426, |
| | | | | | AW054936, AI678867, AI049955, AA828834, |
| | | | | | AI190648, AA721645, AI278372, AW236219, |
| | | | | | AI633386, AI797998, AA744048, AA669155, |
| | | | | | AA572983, AA862312, AI889995, AI636734, |
| | | | | | AI368862, AA283081, AI279417, AW407889, |
| | | | | | AI312090, AI049630, AI689019, AL042667, |
| | | | | | AL042670, AW337805, AI887755, |
| | | | | | AA832016, AA833896, AL049869, Z84469, |
| | | | | | AL122020, AC004821, Z95114, Z83822, |
| | | | | | AL022315, AC002477, AC004815, |
| | | | | | AC007298, AL034429, AC005800, |
| | | | | | AC005736, AL031311, AL009172, |
| | | | | | AC012384, AL034400, AF053356, AC007435, |
| | | | | | AC002312, AC009516, AC004185, |
| | | | | | AC004921, AL031657, AC005670, AF165926, |
| | | | | | AC020663, AL031680, AP000501, AL133245, |
| | | | | | AC002549, AC005697, AC003664, |
| | | | | | AC005755, AL022322, AC002430, |
| | | | | | AC005722, AP000509, AC002395, |
| | | | | | AC005088, AC007384, AC005972, |
| | | | | | AC009509, Z95113, AC006441, AL133243, |
| | | | | | AL035423, AC000025, AC016025, AF117829, |
| | | | | | AC000379, D84394, AL139054, AC005527, |
| | | | | | AC003043, AL031681, AC005531, AP000704, |
| | | | | | AC004659, AC004476, AF001550, |
| | | | | | AC011311, AC005529, AL031431, |
| | | | | | AL022238, AC004494, AC007880, |
| | | | | | AC007242, AC005089, AL022324, |
| | | | | | AL031280, AF064861, AL024507, AC005952, |
| | | | | | AC005837, AL031848, AC004382, |
| | | | | | AC007785, AC007934, AC005484, |
| | | | | | AL049829, AC005412, AC005726, |
| | | | | | AC002091, AC004383, AF111168, Z95115, |
| | | | | | AC002300, AC000035, AP000210, AP000132, |
| | | | | | AF109907, AC004699, AC009946, AP000251, |
| | | | | | AL008629, AC006285, AP000155, AC002369, |
| | | | | | AC005324, AC005037, AC006160, |
| | | | | | AL031666, AC004675, Z98047, AC007684, |
| | | | | | AC016831, AL049843, AL049709, Z74739, |
| | | | | | AP000030, AC005390, Z94056, AL049538, |
| | | | | | AF196970, AC007308, AC004895, |
| | | | | | AC002350, AL035555, AC003048, |
| | | | | | AC007066, AL121658, AC005746, |
| | | | | | AC002528, Z83844, Z99127, AL121603, |
| | | | | | AC005632, AC004585, AC005480, Z86090, |
| | | | | | AL121655, AC005042, AF196969, AC004552, |
| | | | | | AP000098, AL031293, AC002472, AC005969, |
| | | | | | AF088219, AC004231, Y07848, AC004020, |
| | | | | | AC004796, AC005377, AC002381, |
| | | | | | AL031588, AP000500, AL133353, AC002378, |
| | | | | | Z75887, AL022313, Z68324, AC005535, |
| | | | | | AC003962, AL031587, AC004148, |
| | | | | | AL021939, AC005871, AC005880, |
| | | | | | AC007690, AC007664, AC004884, Z95125, |
| | | | | | AC005399, D83253, AC005304, AL035458, |
| | | | | | AC005332, AL035684, AL008631, |
| | | | | | AC004167, AF030453, AC006454, AL022476, |
| | | | | | AC002565, AC004099, AC005669, |
| | | | | | AL031591, AL031432, AC002492, U91321, |
| | | | | | AP000088, AC004865, AL031427, AC009542, |
| | | | | | AP000150, AF003626, AC004685, AC009247, |
| | | | | | AC007546, AC005300, AC005829, |
| | | | | | AC006146, AC006001, AC006023, |
| | | | | | AP000014, AC007312, AC007993, |
| | | | | | AC005730, AC009330, AP000009, Z83846, |
| | | | | | AC012085, AC005808, AL034554, Z84466, |
| | | | | | AC004593, Z98742, AC004859, AL022316, |
| | | | | | AL035409, AC008372, AC005902, AF031078, |
| | | | | | AL109952, AL133448, AP000352, AC003957, |
| | | | | | AF205588, AP000116, AC004816, AC007687, |
| | | | | | AF030876, AC005901, AC000394, |
| | | | | | AC007011, AC002351, AC018633, |
| | | | | | AC005839, AF047825, AC005695, |
| | | | | | AC005180, AC007528, AL031117, |
| | | | | | AC004149, AF067844, AL022320, AL121595, |
| | | | | | AP000689, AC006450, AL033527, AL020997, |
| | | | | | AC005562, AC006064, and AL035587. |
| HEMCL65 | 84 | 910900 | 1-453 | 15-467 | AI902552, and AI902562. |
| HMAMB94 | 85 | 1225343 | 1-2440 | 15-2454 | AW369653, AW024321, AA766018, |
| | | | | | AA905970, AI652025, AA158332, AI627492, |
| | | | | | AW068035, AA158041, Z25180, W40230, |
| | | | | | AI493579, AI536877, AA191353, W45464, |
| | | | | | AW175724, AA670064, AA190444, |
| | | | | | AA248856, AA247921, AL121448, AI926451, |
| | | | | | AI983662, W60091, AW068830, R90961, |
| | | | | | R90977, R90972, and AA309409. |
| HCQCI06 | 86 | 915000 | 1-1190 | 15-1204 | AI123952, AI751915, AA343597, W79144, |
| | | | | | AA345718, AA304549, AA256582, W81545, |
| | | | | | D45547, AL117664, AC068763, AC068763, |
| | | | | | and AC069223. |
| HWLFG75 | 87 | 1227642 | 1-2026 | 15-2040 | AI356559, AW163067, AI937030, AI652337, |
| | | | | | AW028706, AW157098, AW028808, |
| | | | | | AA443325, AA004795, AW005140, |
| | | | | | AW173645, R60229, AA442531, AI274924, |
| | | | | | AI810652, AI924004, AI572794, AI336556, |
| | | | | | AI672253, AI147260, AI872258, AI347103, |
| | | | | | AA467751, AA724594, AI280850, R52646, |
| | | | | | AA536110, H16834, AW450707, AW444512, |
| | | | | | AI376913, AA468349, AI807962, AA927875, |
| | | | | | R42625, AA609873, W28566, AI918962, |
| | | | | | AA578362, AA578062, R17389, C18386, |
| | | | | | R15375, AI016851, R60462, H16941, |
| | | | | | AI423739, AA467933, AA740299, AA025666, |
| | | | | | R42116, AA978110, AI423740, AW117517, |
| | | | | | AI886594, AA443338, AL040243, AI275175, |
| | | | | | AL119748, AL121270, AI857296, AI433157, |
| | | | | | AL045500, AI433976, AW071349, AL047763, |
| | | | | | AI702406, AI250293, AI436456, AL048871, |
| | | | | | AW117882, AI620284, AW195957, |
| | | | | | AL119791, AI064830, AI568870, AI863014, |
| | | | | | AI702433, AI499463, AI538716, AI439087, |
| | | | | | AI349933, AI678302, AI633419, AI868831, |
| | | | | | AI440239, AW074993, AW162071, |
| | | | | | AW235035, AW071417, AW274192, |
| | | | | | AI349256, AI866608, AI349645, AI690835, |
| | | | | | AI498579, AI613017, AI349004, AI349772, |
| | | | | | AW301409, AL135661, AI699857, AI540832, |
| | | | | | AI440426, AW103371, AI628205, AI281779, |
| | | | | | AI500659, AL036146, AL036396, AI340582, |
| | | | | | AI521012, AI500077, AW169653, AI249257, |
| | | | | | AI567351, AI500553, AW238730, |
| | | | | | AW268253, AI224992, AI312152, AI345735, |
| | | | | | AI349937, AW089572, AL120736, AI366549, |
| | | | | | AI564719, AL047042, AI568854, AI597918, |
| | | | | | AI866002, AI673256, AI281773, AI590128, |
| | | | | | AI539771, AL038605, AI497733, AI969601, |
| | | | | | AI636456, AL036802, AW087445, AL119049, |
| | | | | | AW068845, AI282655, AI690751, AI612913, |
| | | | | | AW148320, AI800453, AI800433, AI343112, |
| | | | | | AI909666, AI567632, AI635461, AI687728, |
| | | | | | AI686926, AI800411, AI682841, AW303152, |
| | | | | | AI348897, AI610645, AI349614, AI207510, |
| | | | | | AI697137, AL121365, AI597750, AI921379, |
| | | | | | AI679724, AI758437, AA640779, AI866887, |
| | | | | | AI432229, AA613907, AI625079, AI499393, |
| | | | | | AW301300, AA572758, AL036759, |
| | | | | | AI475371, AL036980, AW074869, AL036274, |
| | | | | | AI815383, AI610307, AI570384, AI631107, |
| | | | | | AI608667, AI818683, AI969567, AI434281, |
| | | | | | AI687376, AI285735, AL046849, AI282903, |
| | | | | | AL040169, AL043326, AI873731, AI920968, |
| | | | | | AI445432, AI469532, AI889203, AI580190, |
| | | | | | AL038779, AI811863, AI680113, AI906328, |
| | | | | | AW085799, AI889839, AI671679, AI874109, |
| | | | | | AI620868, AI753683, AL120854, AI934036, |
| | | | | | AI609592, AI569616, AI583316, AW166645, |
| | | | | | AW080838, AI439745, AI446606, AI255071, |
| | | | | | AI343059, AI866780, AI919058, AW002342, |
| | | | | | AL038778, AI475134, AI687415, AI345860, |
| | | | | | AI952114, AI872711, AW168384, AA585422, |
| | | | | | AI580984, AL047041, AI269696, AI149592, |
| | | | | | AI907070, AI610756, AW167776, AI345111, |
| | | | | | AI799199, AI499131, AW196141, AI499512, |
| | | | | | AI907061, AI909662, AI349598, AI307466, |
| | | | | | AI539153, AL080060, I48979, Y11587, |
| | | | | | AL133016, S68736, AF090901, AF113691, |
| | | | | | I89947, AL133640, AL110221, AL137527, |
| | | | | | A93016, AR059958, S78214, AL049452, |
| | | | | | AL050393, AF090934, AF104032, AF113013, |
| | | | | | AF118064, AF118070, L31396, L31397, |
| | | | | | AF113689, AF078844, AF090900, AF113676, |
| | | | | | AF090903, AL049938, AF125949, AF113694, |
| | | | | | AF090943, AJ242859, AL133606, AL117460, |
| | | | | | AL050146, AL110196, AF113690, AL117457, |
| | | | | | AL050149, AF106862, X84990, I89931, |
| | | | | | AF090896, A08916, AL050116, AL050108, |
| | | | | | AL050138, U42766, AL049466, AL133075, |
| | | | | | AB019565, AL049314, E03348, AL122050, |
| | | | | | AF113677, A08913, AF113019, AL080137, |
| | | | | | AF017152, AL080124, AL137283, AL133557, |
| | | | | | AL122093, AL096744, AL133080, AL050277, |
| | | | | | AR011880, I48978, U91329, AL133093, |
| | | | | | AL122121, E07361, AF158248, X63574, |
| | | | | | AL049430, AF113699, AL137557, AL133565, |
| | | | | | Y16645, Y11254, AL137459, X82434, |
| | | | | | AL122123, AJ000937, AF091084, AC002467, |
| | | | | | AF111851, AF177401, AL117394, AF097996, |
| | | | | | AF146568, AL117583, AF125948, AL110225, |
| | | | | | AL021393, AF079765, AF017437, I49625, |
| | | | | | S61953, I33392, AL049382, A08912, U80742, |
| | | | | | U00763, AL050024, AL117585, E07108, |
| | | | | | AL133560, AL137550, AF095901, A65341, |
| | | | | | AF000145, A08910, AC002464, AL049464, |
| | | | | | AJ238278, E02349, AL049300, AC007390, |
| | | | | | AC006371, AL117435, AF067728, X70685, |
| | | | | | X72889, Z82022, AL122098, AF183393, |
| | | | | | AC006222, AF118094, AF001552, A58524, |
| | | | | | A58523, AL137271, U72620, AL122110, |
| | | | | | A08909, I03321, U62317, AL122049, |
| | | | | | AL022147, AL137463, AL096776, AC004200, |
| | | | | | I09360, AL137538, AL133113, AL049283, |
| | | | | | E05822, A03736, A77033, A77035, |
| | | | | | AC005057, AL031281, AL080127, |
| | | | | | AC007172, AC010077, Z99297, AF061943, |
| | | | | | A12297, U35846, AF087943, AL137648, |
| | | | | | AC007043, A21625, X96540, AC004690, |
| | | | | | A08911, AF110520, AL078630, AL049557, |
| | | | | | AC007458, AL078602, X65873, U95738, |
| | | | | | AP000344, L13297, AC009233, AL110197, |
| | | | | | AF177767, AC007298, AL031346, X93495, |
| | | | | | AC004686, AC006336, AL022165, |
| | | | | | AL133072, AC005291, AC004093, U67958, |
| | | | | | AL080159, A21622, AF130342, AJ012755, |
| | | | | | AP000520, U66059, U95739, and AW514074. |
| HBODA38 | 88 | 923456 | 1-1882 | 15-1896 | AA196401, W79841, AA112831, AA197134, |
| | | | | | C05212, W19681, AA195812, Z25012, |
| | | | | | AI004215, Z30134, AA194641, AI809925, |
| | | | | | AA258550, Z28480, F29133, AA699576, |
| | | | | | F20387, AI129717, AA194359, AI079487, |
| | | | | | AA195355, AA195094, AA931319, F34387, |
| | | | | | Z19343, F36761, H67895, AA258604, |
| | | | | | AI378821, F19321, AI089231, R91150, |
| | | | | | AI702453, AI288969, AI313118, AI351843, |
| | | | | | F31038, N56278, AI381419, AA195356, |
| | | | | | AA131264, AA195051, AA192095, AI264911, |
| | | | | | and AA086284. |
| HCYBK19 | 89 | 1225324 | 1-2764 | 15-2778 | AI829726, AI809562, AI927757, AI927758, |
| | | | | | AI927768, AW297770, AA165336, AI638072, |
| | | | | | AI149852, AW298053, AI365991, AA904547, |
| | | | | | H15885, AA985065, AI359235, AW207262, |
| | | | | | AI470080, AI421572, AA305419, AA985170, |
| | | | | | AW341104, AI423550, AI362528, AI453702, |
| | | | | | AI654827, AA927292, AI365149, AI365324, |
| | | | | | H91991, D81295, AI797740, R62753, |
| | | | | | AI357382, AI953516, AA909430, H01576, |
| | | | | | AA969956, AA379840, H52748, R37302, |
| | | | | | AA905264, Z43289, R18887, R68272, |
| | | | | | H04859, AA746048, T31617, H04764, |
| | | | | | Z44077, T78758, T32807, D60323, |
| | | | | | AA634475, H01477, AI193962, H00918, |
| | | | | | D81446, M86147, AA983881, AA318875, |
| | | | | | N64328, AA165369, D62629, Z39361, |
| | | | | | T16370, F03272, H00919, N34301, H46107, |
| | | | | | AW590162, AW593404, AW593449, |
| | | | | | AW593464, and AW593480. |
| HWNCY05 | 90 | 1223031 | 1-1181 | 15-1195 | W40569, AW025860, D63226, AA334307, |
| | | | | | AL038838, AL037436, AL037323, AL038983, |
| | | | | | AI142134, AL134524, AL038822, AL037727, |
| | | | | | AL038532, AL037343, AL040617, AL044186, |
| | | | | | AL041238, AL047012, AL037335, AL037435, |
| | | | | | AL044125, AL044037, AL047170, AL040463, |
| | | | | | AL045684, AL040625, AL047219, AL044162, |
| | | | | | AL043677, AL040193, AL043467, AL040510, |
| | | | | | AL040621, AL043538, AL041752, AL047183, |
| | | | | | AL043496, AL040464, AL043923, AL043814, |
| | | | | | AL037443, AL040576, AL043845, AL040839, |
| | | | | | AL045753, AL041635, AL041133, AL041347, |
| | | | | | AL040294, AL041324, AL046442, AL044064, |
| | | | | | AL041459, AL041577, AL040322, AL043492, |
| | | | | | AL041602, AL041098, AL044074, AL046850, |
| | | | | | AL040052, AL040768, AL040119, AL046994, |
| | | | | | AL041730, AL041523, AL043627, AL046914, |
| | | | | | AL040472, AL041374, AL045817, AL041096, |
| | | | | | AL043848, AL043570, AL042135, AL040444, |
| | | | | | AL041163, AL047057, AL037295, AL045671, |
| | | | | | AL039316, AL041159, AL038761, AL041955, |
| | | | | | AL046392, AL040075, AL041292, AL041358, |
| | | | | | AL044272, AL041296, AL041142, AL044258, |
| | | | | | AL041346, AL041086, AL041168, AL045920, |
| | | | | | AL040149, AL040529, AL040148, AL040332, |
| | | | | | AL042898, AL046330, AL049018, AL041197, |
| | | | | | AL040458, AL044187, AL041246, AL047036, |
| | | | | | AL041233, AL045990, AL039643, AL040128, |
| | | | | | AL040571, AL040553, AL040745, AL040370, |
| | | | | | AL044274, AL079878, AL039338, AL041277, |
| | | | | | AL040342, AL040155, AL045328, AL044199, |
| | | | | | AL041131, AL041186, AL040285, AL040414, |
| | | | | | AL039360, AL041051, AL040091, AL039744, |
| | | | | | AL037341, AL044165, AL040090, AL045989, |
| | | | | | AL040168, AL042096, AL043941, AL079852, |
| | | | | | AL041227, AL043775, AL046327, AL044201, |
| | | | | | AL040253, AL045857, AL040082, AL039432, |
| | | | | | AL043444, AL040329, AL038745, AL041140, |
| | | | | | AL044529, AL037279, AL041278, AL040263, |
| | | | | | AL045725, AL040255, AL040238, AL047037, |
| | | | | | AL039915, AL043612, Z28355, AL049069, |
| | | | | | AL134110, AL047163, D61254, AA585101, |
| | | | | | T11028, AL043537, AI546945, AL041210, |
| | | | | | T23957, T23985, AL045211, AA585439, |
| | | | | | AL046147, AI526194, AA585476, AI525556, |
| | | | | | AI547295, C16300, AI541365, Z30131, |
| | | | | | AA174170, AL045327, AI541374, AI525431, |
| | | | | | AI541523, AI541514, R29445, AL041344, |
| | | | | | AI540967, AI541390, C16305, AI546999, |
| | | | | | AI541508, D57491, I23888, AL080031, |
| | | | | | AI557238, AI526073, AI557731, AI526140, |
| | | | | | T41289, AI557262, AI525306, R29218, |
| | | | | | AI541535, AI535660, AI557799, D55233, |
| | | | | | C14723, AA585453, AI546828, AA585356, |
| | | | | | AI546875, AI547006, AI525320, AI556967, |
| | | | | | AI541205, AI535639, R29177, AI541013, |
| | | | | | R28735, AI546855, AI541509, C15189, |
| | | | | | AI526184, AI541534, AI526176, AI557734, |
| | | | | | AI526144, AI541017, AI525316, AA283326, |
| | | | | | AI546891, AI557727, AI536138, AI541533, |
| | | | | | AI557787, AL038651, AI541307, AI526186, |
| | | | | | R28895, AC006928, AR064707, I05558, |
| | | | | | I18895, I08396, Y16359, E13740, E03627, |
| | | | | | AR062871, A25909, I48927, I84553, I84554, |
| | | | | | A81878, A60212, A60209, A60210, A60211, |
| | | | | | A02712, A77094, A77095, AJ244003, |
| | | | | | AJ244004, AJ244005, AF082186, AR031566, |
| | | | | | A35536, I08389, A98767, A02135, A04663, |
| | | | | | A93963, A93964, AR062872, I63120, |
| | | | | | AR017907, AR062873, I00682, A11623, |
| | | | | | E00609, I06859, A11178, E01007, A18050, |
| | | | | | A23334, A75888, I70384, A60111, A23633, |
| | | | | | AR007512, I15717, I15718, A90655, I08395, |
| | | | | | D13316, AR043601, A95051, A18053, |
| | | | | | A64973, A20702, A43189, A43188, A20700, |
| | | | | | A98420, A98423, A98432, A98436, A98417, |
| | | | | | A98427, M28262, A85395, AR038855, |
| | | | | | A85476, A35537, D78345, A02136, A04664, |
| | | | | | A11245, A11624, AR037157, AR054109, |
| | | | | | I13349, A10361, A91750, A02710, E14304, |
| | | | | | A07700, A13392, AR031488, I13521, I52048, |
| | | | | | I44531, I21869, A91965, I44516, A70040, |
| | | | | | E16678, AJ244007, I44681, X83865, A84772, |
| | | | | | A84776, A84773, A84775, A84774, |
| | | | | | AR067731, AR067732, A58522, A22738, |
| | | | | | I62368, A86792, A93016, I01995, I25027, |
| | | | | | I26929, I44515, I26928, I26930, I26927, |
| | | | | | I08051, AF149828, I03331, E12615, |
| | | | | | AR035193, A92133, A13393, A27396, |
| | | | | | AR027100, I49890, I28266, A82653, E16636, |
| | | | | | A24783, A24782, A95117, AB025273, I60241, |
| | | | | | I60242, D50010, A58524, A58523, AJ238010, |
| | | | | | A20699, E00696, E00697, E03813, I66482, |
| | | | | | AR009151, I66483, I66484, AR027099, |
| | | | | | I66487, Y09813, AR051957, AR038762, |
| | | | | | I66485, I66498, I66497, I66496, AR038066, |
| | | | | | I66486, AR066494, AR051652, Z32836, |
| | | | | | AR051651, AR008429, AJ230935, X07299, |
| | | | | | AJ230902, AJ230951, AJ231009, A70872, |
| | | | | | AJ230972, E17098, D13509, X81969, |
| | | | | | AJ231028, U94592, AJ230867, AR022273, |
| | | | | | I66495, I66494, A22734, AJ230845, A70869, |
| | | | | | E12584, I19525, A93923, D17247, A06631, |
| | | | | | AR035975, AR035977, S60422, A93916, |
| | | | | | AR063812, I18302, Y14219, A24548, A24546, |
| | | | | | A93931, A16035, A85203, I33632, AL133053, |
| | | | | | AR035974, AR035976, AR035978, |
| | | | | | AL122101, E03654, AR023813, AR054723, |
| | | | | | AL133074, AL133049, and A22739. |
| HTXNN68 | 91 | 1143300 | 1-1516 | 15-1530 | AA287304, AI418151, AA885205, N32677, |
| | | | | | AA147402, AI630898, AI362039, AW075796, |
| | | | | | AA905465, and D86967. |
| HWWFW06 | 92 | 933671 | 1-880 | 15-894 | AA287304, AI418151, AA885205, N32677, |
| | | | | | AI630898, AA147402, AI362039, AW075796, |
| | | | | | AA905465, AL134533, AW392670, |
| | | | | | AL134531, AI142139, AL119418, AL119483, |
| | | | | | AL119319, AL119443, AL119324, AL119522, |
| | | | | | U46350, AL119457, AL134920, AW372827, |
| | | | | | AW363220, AL119484, AL119391, |
| | | | | | AL134538, AL134902, AL119341, Z99396, |
| | | | | | AW384394, AL119497, AL119363, |
| | | | | | AL119355, AL119396, AL119496, D86967, |
| | | | | | AR069079, AB026436, AR066494, |
| | | | | | AR060234, and A81671. |
| HOSDR06 | 93 | 1229558 | 1-2170 | 15-2184 | AI942417, AI800288, AI830283, AW384845, |
| | | | | | AA442721, AI637544, AA252612, AA305619, |
| | | | | | AA224269, N63098, AI670786, AA811590, |
| | | | | | N80213, AA431396, AI498460, AA371384, |
| | | | | | N30797, AI280008, AA298474, Z24818, |
| | | | | | AA432386, AI770070, AA364533, AA280152, |
| | | | | | AA297828, F13799, AA875925, N93459, |
| | | | | | AI110673, AA090893, AA029327, AA825662, |
| | | | | | F30025, AA029328, N41572, AA298473, |
| | | | | | AI768963, AI949001, R33662, AW105155, |
| | | | | | AI377278, AA018569, AW195563, |
| | | | | | AW377767, AI215536, AI268149, AA280153, |
| | | | | | AA804204, and D38552 |
| HNFHW14 | 94 | 939763 | 1-522 | 15-536 | |
| HSDHB12 | 95 | 941973 | 1-624 | 15-638 | AA447298. |
| HTTJW49 | 96 | 948107 | 1-648 | 15-662 | AA199865, AI769428, AI061340, AW268880, |
| | | | | | AA707168, AI970984, AI884812, AW444872, |
| | | | | | AI479954, AI356088, AI701720, AI765045, |
| | | | | | AA722812, AW236544, AA410516, |
| | | | | | AI267987, AA005114, AI298592, AI865503, |
| | | | | | AI633370, AA878382, AW389168, |
| | | | | | AF118838, Y17571, AF164632, AF164526, |
| | | | | | AF164527, AC004458, AF164528, and |
| | | | | | AF164525 |
| HELDR74 | 97 | 1218982 | 1-1428 | 15-1442 | AI741422, AW249482, AA573909, |
| | | | | | AA085764, AW272801, AI052311, |
| | | | | | AA490620, AI683396, AA151131, AI700257, |
| | | | | | AA310938, AI284596, AA961817, AA862960, |
| | | | | | AW073675, R87485, AI828443, AI925221, |
| | | | | | AI969547, AW001375, AI521481, N24896, |
| | | | | | AI925228, AI695515, AA609182, AA151130, |
| | | | | | AI245859, AA490809, AA040451, |
| | | | | | AW139250, AI970384, AI961068, T67610, |
| | | | | | AA923298, AA513675, AW027490, T96070, |
| | | | | | AI624751, T67494, AI936161, AW196036, |
| | | | | | AI917354, AA679554, N36317, AA302588, |
| | | | | | AI932690, AW250249, R88163, T72363, |
| | | | | | AI796143, W32439, AA582049, AI539047, |
| | | | | | W45013, and AF113795. |
| HOEET48 | 98 | 963290 | 1-1466 | 15-1480 | AI797684, AW239200, AA456267, AI478733, |
| | | | | | AI751749, AI990902, AA427646, AI379565, |
| | | | | | AI970534, W95460, AA788855, AA405402, |
| | | | | | AW068453, AW294114, AI751750, |
| | | | | | AA594137, AA947297, AW177719, |
| | | | | | AI057073, AA427487, AI341112, AA232452, |
| | | | | | AA041304, AW068711, H73236, AA041328, |
| | | | | | W95567, AW167569, AA853047, AI652166, |
| | | | | | W02069, H74164, R34003, AI341381, |
| | | | | | AW176526, AA580289, D30965, D31176, |
| | | | | | AA367502, and AR035969 |
| HBODE51 | 99 | 1188998 | 1-2580 | 15-2594 | AW083201, AA056328, AA404251, |
| | | | | | AA404701, AA610014, AA535370, |
| | | | | | AA479540, W26963, AI803179, AA693610, |
| | | | | | AA167788, AA477641, T30626, AW118235, |
| | | | | | AA148356, R20037, T10239, W40184, |
| | | | | | AA677785, AA780412, T33085, T15444, |
| | | | | | Z36286, F37344, AA166644, Z43182, |
| | | | | | AW367537, AI699497, AA258857, |
| | | | | | AA480033, W28626, AI625089, F27424, |
| | | | | | R61287, AI569618, AW376308, AA324131, |
| | | | | | AW337372, T10238, Z41030, AA319764, |
| | | | | | R19966, AW058317, AW268504, AA091588, |
| | | | | | F04174, AI807608, AA249876, AI758553, |
| | | | | | AI887457, AA665925, R54586, AW009070, |
| | | | | | AA641818, AW166832, AI627360, T80262, |
| | | | | | AI619820, AI698391, AA767924, AI918435, |
| | | | | | AI553645, AI636507, AI244343, AI872423, |
| | | | | | AW238688, AI524179, AI913330, AI824458, |
| | | | | | AI348609, AI889189, AI918809, AI559752, |
| | | | | | AI247293, AI138221, AI648494, AW148350, |
| | | | | | AL036634, AI499890, AI479292, AI818350, |
| | | | | | AI800159, AI927233, AI612913, AI445611, |
| | | | | | AI470717, AI287616, AI452560, AA804541, |
| | | | | | AI433647, AI613270, AL042745, AL042744, |
| | | | | | W45039, AW089638, A99218, Y14494, |
| | | | | | A99220, AJ012755, AF087943, A23327, |
| | | | | | AL133623, AF131821, Z13966, AF090900, |
| | | | | | AF129131, AL137271, AF141289, AL110223, |
| | | | | | A84109, X83544, AF172319, X69026, |
| | | | | | X60769, AF115410, AL137478, Y10183, and |
| | | | | | AJ005690. |
| HE8UT58 | 100 | 973153 | 1-1090 | 15-1104 | AL079991, AW409774, AA404732, |
| | | | | | AA782257, AI808909, AA099036, AA677654, |
| | | | | | AA405418, AW341107, AW409667, |
| | | | | | AA659407, AA503263, AI433410, AI885266, |
| | | | | | AI341147, AA905366, AI692534, AI027623, |
| | | | | | AA468344, AA923181, AA778251, AI681129, |
| | | | | | AA533117, AI986154, AA099037, AI955317, |
| | | | | | AI276678, H29006, AA404602, AI347168, |
| | | | | | AA371047, AI420387, AW135263, |
| | | | | | AA868124, T12623, H09118, AA430277, |
| | | | | | AA365338, T08839, AA813337, H29109, |
| | | | | | H11272, AW137535, AB014534, AF116574, |
| | | | | | AF116573, and AC032004. |
| HFXJI27 | 101 | 971046 | 1-427 | 15-441 | AI335925, AI890750, AA187638, N39062, |
| | | | | | AI268071, D79411, N75622, N22381, |
| | | | | | H13284, R43578, F10497, R26373, AI625385, |
| | | | | | AI220697, R21997, AA932204, AI493179, |
| | | | | | AI373111, AA909963, AI476063, AA909961, |
| | | | | | AI888010, AI619918, AA976881, AW339040, |
| | | | | | AI432041, AA015789, AI049514, AI355877, |
| | | | | | AI888471, N59174, AI679618, AI373318, |
| | | | | | AA670204, AI358468, AI336216, AI266210, |
| | | | | | AA947133, R33792, AW081307, AA610540, |
| | | | | | AA928678, AA922947, AA922946, AI817788, |
| | | | | | AI245931, AA948492, AA044223, T63607, |
| | | | | | AI433872, AW269052, AI587384, AA827770, |
| | | | | | AW182646, AI127888, H89128, AI268557, |
| | | | | | D62713, T63317, R35227, AA018661, |
| | | | | | AW023089, N67948, T62565, H01498, |
| | | | | | R21841, AW151373, D29213, AW022288, |
| | | | | | AA678512, and AB023187. |
| HETHO38 | 102 | 1124598 | 1-1393 | 15-1407 | AA675914, AW058625, AA595003, |
| | | | | | AA565043, AW192302, T54086, AI287312, |
| | | | | | AA988703, AW438698, AA675910, |
| | | | | | AI990695, N40329, AA079650, T54177, |
| | | | | | AI824376, AI675850, AA079556, AA303646, |
| | | | | | N71782, AW367626, AA675909, T29568, |
| | | | | | H69835, C01666, AA352261, AI969951, |
| | | | | | AA077925, AA441887, L14848, AF055384, |
| | | | | | AB015600, U56947, U56949, U56955, |
| | | | | | Y16801, Y16809, Y16811, Y16807, Y18114, |
| | | | | | Y16804, U56944, U56948, Y18113, Y18116, |
| | | | | | U56943, U56945, Y16803, AF097406, |
| | | | | | U56942, Y18111, Y18115, X91625, Y18117, |
| | | | | | U56952, Y16808, Y16805, U69978, Y18112, |
| | | | | | U56941, U56946, Y16806, Y18118, U56953, |
| | | | | | U56954, Y16810, AF097403, AF097404, |
| | | | | | U56940, U56950, U56951, Y18110, |
| | | | | | AF045597, AF055385, U95731, AF021223, |
| | | | | | AF021224, U95730, U95732, U95733, |
| | | | | | U95734, AF021225, AF021226, U95729, |
| | | | | | AF055387, AF021222, AF021221, AF055386, |
| | | | | | AF055389, AF055388, AC004180, X92841, |
| | | | | | AJ249394, AC006046, AB000882, AB000878, |
| | | | | | AP000506, U65416, AC004170, D84394, |
| | | | | | AP000507, Y16802, AB023058, AJ242442, |
| | | | | | AP000521, AL022723, AF045598, AF055066, |
| | | | | | AJ242438, AJ242439, AF045600, AF045599, |
| | | | | | AJ242441, AF055390, AF045596, AF045604, |
| | | | | | AF045601, AC004208, AB014083, AJ242440, |
| | | | | | AJ242443, AP000515, AF045603, AF045602, |
| | | | | | U69625, U69628, U69623, U69624, U69629, |
| | | | | | U69626, U69631, AJ242444, L29410, L29409, |
| | | | | | AJ242445, L29408, U69630, U69627, L29411, |
| | | | | | L29406, L29407, U69622, AC004207, |
| | | | | | AC004200, AP000519, AB023056, |
| | | | | | AB003601, AB003600, AB003599, |
| | | | | | AB003606, AB003605, AB003608, AJ251160, |
| | | | | | AB003604, AB003602, AB003603, |
| | | | | | AB003607, AJ251156, AJ251158, AB003609, |
| | | | | | AB003612, AJ251157, AB003614, AB003610, |
| | | | | | AB003611, AB003616, AJ251159, AJ251161, |
| | | | | | AF106651, AF011836, AF085020, AF011845, |
| | | | | | AF136158, AF106633, AF106642, AF085024, |
| | | | | | AF011887, AF011860, AF106639, AF106648, |
| | | | | | AF011839, AF011848, AF079414, AF011842, |
| | | | | | AF085013, AF106637, AF106655, AF085029, |
| | | | | | AF106643, AF136159, AF106634, AF106640, |
| | | | | | AF106649, AF085037, AF011879, AF106646, |
| | | | | | AF106635, AF011853, AF136157, AF106638, |
| | | | | | AF106641, AF011847, AF106632, AF106647, |
| | | | | | U69965, U69971, U69969, U69966, U69975, |
| | | | | | U69964, U69977, U69968, U69967, |
| | | | | | AB000880, AF085022, AF085014, AF085050, |
| | | | | | AF085038, AF085046, AF085018, and |
| | | | | | U69973. |
| HTEIL07 | 103 | 953803 | 1-445 | 15-459 | H55431, and AL031843. |
| HDPTC44 | 104 | 553453 | 1-561 | 15-575 | AF010446, U22963, AF031469, AF010447, |
| | | | | | AF073485, AF073486, AJ132011, U94989, |
| | | | | | AF010448, AF035672, and AF068692. |
| HHPDE40 | 105 | 552112 | 1-582 | 15-596 | AW449998, U60319, AF079407, Z92910, |
| | | | | | AR036572, U91328, Y09800, AF079409, |
| | | | | | AF079408, and Y09801. |
| HCESP56 | 106 | 827671 | 1-500 | 15-514 | AW247740, AW247029, AW204207, |
| | | | | | W39269, AA325536, R14422, W52568, |
| | | | | | Y16752, AL022170, and Z65186. |
| HHFGZ38 | 107 | 1117192 | 1-1546 | 15-1560 | AA372117, AI864976, AI468754, AA133546, |
| | | | | | AA160339, AW449104, AI206956, |
| | | | | | AW374444, AA595656, AA278441, |
| | | | | | AI767157, AI263438, AI859910, AA216640, |
| | | | | | AA070240, T59738, and AA311762. |
| HAHEF22 | 108 | 910996 | 1-872 | 15-886 | AA447298. |
| HCUEV29 | 109 | 816065 | 1-491 | 15-505 | AW410192, AI570209, AA583494, |
| | | | | | AW087991, AW337550, T30350, T24722, |
| | | | | | AW246233, and AL031283. |
| HBGQN46 | 110 | 945370 | 1-888 | 15-902 | AA479990, AW293680, AI473367, AI184880, |
| | | | | | AI086741, AI081183, AI214276, AA742259, |
| | | | | | AA836754, R55060, AA251267, AI285889, |
| | | | | | AI813391, AW297831, AI819671, AF038458, |
| | | | | | and AF038458. |
| HMQCE42 | 111 | 806815 | 1-194 | 15-208 | D56208, N44225, AA348075, AA351420, |
| | | | | | R19052, AA449607, H23327, AA227277, |
| | | | | | AA081491, AA102697, R54504, AA083156, |
| | | | | | Z46810, D38526, D49552, AJ010749, X96582, |
| | | | | | X97321, Y09156, X83394, Z33459, D64147, |
| | | | | | U09853, X70857, M28160, D11383, |
| | | | | | AJ001977, D83957, and AP000508. |
| HEQAY32 | 112 | 1207206 | 1-2599 | 15-2613 | AA459604, AA703415, AA703508, AI337830, |
| | | | | | AA993540, AI924185, AA398958, AA047107, |
| | | | | | AI581879, R88084, H08326, AA399541, |
| | | | | | AA047244, AI479681, AI570681, AW007699, |
| | | | | | AA826082, R50486, AA742413, AI278602, |
| | | | | | AA810070, AW129039, AI346375, AI636166, |
| | | | | | AI468327, Z44337, AW248520, AI817167, |
| | | | | | AI188457, AI923575, AI480234, AI184221, |
| | | | | | AI289600, AW005514, AI696876, AA864258, |
| | | | | | AW248475, AI804579, AW000853, |
| | | | | | AI091327, AI192782, AW104750, AI299237, |
| | | | | | AA766769, AI124027, AI309629, AA450027, |
| | | | | | AI378094, AA829783, AA505829, AA421949, |
| | | | | | AI721136, AI923569, T79992, AA317334, |
| | | | | | AI269575, AA878088, R50042, H08229, |
| | | | | | AA852854, N27053, T36249, Z45648, |
| | | | | | AA454095, AA878089, M78847, AI523984, |
| | | | | | AA740396, H08868, AI366112, AA322162, |
| | | | | | AW138078, F04540, AI824732, AA373622, |
| | | | | | AI864722, AI383526, F04098, AW009838, |
| | | | | | AA825440, Z43430, F02816, F07842, R50380, |
| | | | | | AI983715, AA383971, T24108, AI979211, |
| | | | | | AA402090, AW271173, AA335352, R14266, |
| | | | | | AL110339, AW080157, W45039, AI359744, |
| | | | | | AA713657, H03560, AA582025, AI553645, |
| | | | | | AL036673, AI640375, AI824576, AI287449, |
| | | | | | AA102339, AI871660, AI582900, AI743505, |
| | | | | | AI401697, AW007284, AB033004, AF104222, |
| | | | | | AC006529, AF124728, AL137294, |
| | | | | | AW514348, and AW778993. |
| HOEFI09 | 113 | 974194 | 1-426 | 15-440 | C18310, AW402322, AW405194, AW402317, |
| | | | | | AW408434, AW401505, AL039796, |
| | | | | | AW239462, D82221, AW402511, AA158109, |
| | | | | | AA160317, AA263135, AI124815, AA310808, |
| | | | | | AW327936, D82189, AW401719, AW402264, |
| | | | | | AW402698, AA160714, AA151951, |
| | | | | | AW403872, AA663896, AW402402, D82177, |
| | | | | | AA100848, AA100680, AW405525, R19052, |
| | | | | | AA102697, AW401548, AW403793, |
| | | | | | AA224068, AW402754, AW408440, |
| | | | | | AA401643, W40489, F13067, AI826037, |
| | | | | | AW403392, AA381090, H23327, AA121088, |
| | | | | | AW402383, AA449607, T52124, AA380938, |
| | | | | | AA381088, AA160037, AA159230, |
| | | | | | AA336651, R12066, AI359260, AL138056, |
| | | | | | AA157351, AW403114, AA295712, |
| | | | | | AA381030, AA351420, T29764, AA548636, |
| | | | | | AA058454, AW402855, AI365653, N44225, |
| | | | | | AA295685, AA227277, AA350486, F07582, |
| | | | | | T72958, AA127128, AA159413, AW402401, |
| | | | | | AA160101, D56208, AA112349, W52004, |
| | | | | | AA152039, AA344828, AA348075, |
| | | | | | AW273557, F06315, AA143652, AA102181, |
| | | | | | AA488534, AI696864, T52219, H23377, |
| | | | | | AA159125, F06589, AA358919, AW403253, |
| | | | | | AA085102, U46382, AA263158, AA143468, |
| | | | | | AA143626, R59764, AA916617, R30668, |
| | | | | | AA295230, T75330, Y13029, U96942, |
| | | | | | Z46808, L36591, L22028, L36318, M94052, |
| | | | | | M94051, M24040, Y09058, M24032, L22649, |
| | | | | | U29083, M94053, D44501, U04243, U11262, |
| | | | | | U11266, U09864, L42024, L07950, U21053, |
| | | | | | L11571, L11570, D50296, AF016641, |
| | | | | | U36392, M84380, M24036, U04244, X64454, |
| | | | | | L20088, AB032096, X61709, U29480, |
| | | | | | L42280, D50300, U56246, U16298, AJ223282, |
| | | | | | X94574, AB032097, U58110, L76931, |
| | | | | | D44500, X99735, U17572, U11267, L76093, |
| | | | | | D31816, M95530, D50294, L22027, L11666, |
| | | | | | D44499, D50295, Y18552, L17005, U03698, |
| | | | | | M32320, X81363, AF170577, U80945, |
| | | | | | U05578, L32862, L41353, D83956, D50293, |
| | | | | | U03027, U03859, L11603, L19937, L42281, |
| | | | | | M24039, U05575, X13116, M30679, L41925, |
| | | | | | Z15143, AJ245869, M24035, U90558, |
| | | | | | AJ002676, D49824, M80670, E03437, |
| | | | | | Y08994, M68964, M32319, U31334, Y09118, |
| | | | | | L09736, M84694, U50710, L41214, X94480, |
| | | | | | AF033351, L42506, AJ250917, E03438, |
| | | | | | X91749, M24034, U21052, Y13567, L76088, |
| | | | | | M84383, AJ006020, M28203, U70528, |
| | | | | | L76094, M84382, U04245, U29057, M32317, |
| | | | | | U88407, M28205, X90391, X84725, M84384, |
| | | | | | M33573, L42345, U32678, AB036051, |
| | | | | | M19756, AF161881, X94481, X75953, |
| | | | | | AF189017, X64366, M24038, L42282, |
| | | | | | L42283, D83030, AF118894, AJ131118, |
| | | | | | D50290, M24075, X60255, X60693, U64801, |
| | | | | | X90390, D50291, M19757, AF022783, |
| | | | | | AF115460, M77775, X77658, L24373, |
| | | | | | M15470, M28204, D25275, U01848, U35431, |
| | | | | | X60253, M84386, D85761, U11263, U14943, |
| | | | | | AF118895, U75533, X96582, Y09156, |
| | | | | | L38504, L54059, U90566, D85762, M24037, |
| | | | | | X13115, U18789, X60254, L20089, U90559, |
| | | | | | U31971, U90563, U90564, U90565, U11261, |
| | | | | | L09735, L20090, M84381, M77778, M77777, |
| | | | | | M77776, AJ133267, E02885, M58636, |
| | | | | | U05580, D50068, U11265, Y08995, X61710, |
| | | | | | X61706, X58536, D50299, U17107, U30936, |
| | | | | | M24045, M84385, X03664, U63653, D83043, |
| | | | | | E02884, L04696, U30904, L40599, U05576, |
| | | | | | U05577, D14343, M29864, AJ223602, |
| | | | | | U34810, AF115461, Y09157, X61707, |
| | | | | | L41086, D50710, M26432, M59840, U06862, |
| | | | | | L04695, AJ237703, X99704, AB032094, |
| | | | | | AJ002675, AJ003063, AJ002677, L76935, |
| | | | | | Z22651, U41832, M32318, U05582, |
| | | | | | AF130734, AF118893, M77774, AP000507, |
| | | | | | M29865, D64149, and X60251. |
| HSDGJ23 | 114 | 1182294 | 1-731 | 15-745 | |
| HCEOR02 | 115 | 1227680 | 1-2094 | 15-2108 | AW292158, AI933139, AA325666, |
| | | | | | AA317428, and AI887071. |
| HLTEH39 | 116 | 943641 | 1-170 | 15-184 | AA970332, AA361489, AA158146, |
| | | | | | AW402698, AW405525, AW402322, |
| | | | | | AW385684, AW401505, C18310, AW401548, |
| | | | | | AW239462, AW402264, AW401719, |
| | | | | | AA294911, AA151951, AA663896, |
| | | | | | AA263135, AA352603, AA243206, C03945, |
| | | | | | AA527306, AW351546, AW405194, |
| | | | | | AW402317, AW408434, AI696864, |
| | | | | | AW327936, AA160714, AA477506, |
| | | | | | AA190717, AA305941, AA367387, AI365653, |
| | | | | | AA366365, AA527504, AA158109, T68508, |
| | | | | | AA337991, AA372227, AA321294, |
| | | | | | AA159413, AL039796, AA100848, |
| | | | | | AW403872, AA112349, AA385962, |
| | | | | | AA581164, F00945, H98493, AA335761, |
| | | | | | AW402402, AA121088, AA127128, |
| | | | | | AA310808, AA100680, T10924, T71226, |
| | | | | | AA401643, R34651, AA352534, AA058454, |
| | | | | | AA126083, AA227277, N42582, W24084, |
| | | | | | W24054, AA304603, H11697, AW402383, |
| | | | | | H23327, AA361916, AA220207, AW403793, |
| | | | | | AA449607, F11628, AW402754, AA492406, |
| | | | | | AA503610, T55088, U15638, D83030, |
| | | | | | M84386, X96582, Y09156, L54059, M26432, |
| | | | | | X58536, U43337, M77775, U36492, U15640, |
| | | | | | U14756, AF035647, D64148, L76088, |
| | | | | | L20091, D83031, AJ010748, M99388, |
| | | | | | AF168611, X67818, X60251, U18789, |
| | | | | | AB032096, AB032097, AJ223282, X94482, |
| | | | | | U29480, U74387, U18661, U06835, D64149, |
| | | | | | Z33459, D64147, L42280, Y09058, M94052, |
| | | | | | M94053, M94051, U04243, L22649, L36318, |
| | | | | | L17005, X78343, X87841, X70857, Y10520, |
| | | | | | X60249, X60248, M24096, M28160, X94574, |
| | | | | | AB032091, AB032094, AB032095, U38976, |
| | | | | | AF033351, AF115464, Z46810, AF076476, |
| | | | | | Z80227, X99704, U83580, D64151, D83029, |
| | | | | | L20088, M77774, M77778, M77777, M77776, |
| | | | | | M24040, M24032, M24033, Z15144, M84381, |
| | | | | | U63653, D49552, D50854, AJ010749, Z83247, |
| | | | | | X76189, X97321, U09853, M84173, M84174, |
| | | | | | Y11843, X83394, X95410, M28207, M26712, |
| | | | | | M28206, M26430, AB036049, AB036050, |
| | | | | | AB036051, X94480, X87268, L76090, |
| | | | | | L42506, AJ242661, L76931, U58110, D38526, |
| | | | | | D64145, M11886, Y13029, U32660, M29865, |
| | | | | | D44499, D44501, U11262, U11266, M83193, |
| | | | | | M83191, M83194, L07950, M86403, |
| | | | | | AF118894, D85762, U03027, U03698, |
| | | | | | U03859, L11571, L11570, D50294, D50296, |
| | | | | | D50299, D31816, L22027, M24039, M95530, |
| | | | | | L11666, L11603, L19937, X61709, U80945, |
| | | | | | AF016641, U30936, U36392, M84384, |
| | | | | | X73518, M24030, U38975, AJ250917, |
| | | | | | D49824, U05584, M28203, AJ238694, |
| | | | | | U15639, AB032093, AB032599, D83741, |
| | | | | | AJ002676, AJ002677, X86704, U34810, |
| | | | | | L76093, L76930, L76094, L76089, U16298, |
| | | | | | L75942, L76932, L76933, L36979, L76225, |
| | | | | | D25275, U74386, AB032933, D64146, |
| | | | | | D64152, D14343, U11261, U11265, U17572, |
| | | | | | M83195, U05577, U50837, L20089, E02884, |
| | | | | | D85761, Y08995, X90390, X91749, U06862, |
| | | | | | M24036, L04696, L09736, M24034, L04695, |
| | | | | | M84694, X61710, X61706, U17107, U21052, |
| | | | | | U30904, U29083, L41353, L42281, |
| | | | | | AF170577, L40599, X81363, M84380, |
| | | | | | M84385, U88407, X82122, M28172, U06695, |
| | | | | | U41420, AF115462, L38251, X70856, |
| | | | | | Z22651, M21963, U59654, M28204, |
| | | | | | AJ251755, Z46809, AB032598, U18660, |
| | | | | | AB030575, AJ002675, X99735, AJ223602, |
| | | | | | AJ003063, U32678, U59647, D50852, |
| | | | | | M26429, AJ272049, Z72007, AB008136, |
| | | | | | AJ237703, Z79751, Z47377, U07230, D49820, |
| | | | | | D50710, D44500, Y09118, Y13567, M83192, |
| | | | | | U05576, X64454, D50290, D50293, U04245, |
| | | | | | U21053, U29057, AC004204, and AC004204. |
| HRODF07 | 117 | 1222093 | 1-1299 | 15-1313 | AW238558, AI278521, AW238227, |
| | | | | | AW084017, AW265370, AW440242, |
| | | | | | AW238497, AW238306, AW238292, |
| | | | | | AW082445, AI355144, AW082458, |
| | | | | | AW238597, AW079466, AW366290, |
| | | | | | AW381175, AW366622, AW276887, |
| | | | | | AW270776, AW438489, AW270547, |
| | | | | | AW270610, AW438542, AI821931, |
| | | | | | AW270648, AW265248, AA610773, |
| | | | | | AW276814, AW277207, AA729444, |
| | | | | | AW276866, AW270597, AI732543, |
| | | | | | AW276913, AW265112, AW265170, |
| | | | | | AW438551, AW270550, AA501809, |
| | | | | | AW276884, AJ243667, AF077374, and |
| | | | | | AI355145. |

[0089] TABLE 4

| Code | Description | Tissue | Organ | Cell Line | Disease | Vector |
|---|---|---|---|---|---|---|
| AR022 | a_Heart | a_Heart | | | | |
| AR023 | a_Liver | a_Liver | | | | |
| AR024 | a_mammary gland | a_mammary gland | | | | |
| AR025 | a_Prostate | a_Prostate | | | | |
| AR026 | a_small intestine | a_small intestine | | | | |
| AR027 | a_Stomach | a_Stomach | | | | |
| AR028 | Blood B cells | Blood B cells | | | | |
| AR029 | Blood B cells activated | Blood B cells | | | | |
| | | activated | | | | |
| AR030 | Blood B cells resting | Blood B cells | | | | |
| | | resting | | | | |
| AR031 | Blood T cells activated | Blood T cells | | | | |
| | | activated | | | | |
| AR032 | Blood T cells resting | Blood T cells resting | | | | |
| AR033 | brain | brain | | | | |
| AR034 | breast | breast | | | | |
| AR035 | breast cancer | breast cancer | | | | |
| AR036 | Cell Line CAOV3 | Cell Line CAOV3 | | | | |
| AR037 | cell line PA-1 | cell line PA-I | | | | |
| AR038 | cell line transformed | cell line transformed | | | | |
| AR039 | colon | colon | | | | |
| AR040 | colon (9808co65R) | colon (9808co65R) | | | | |
| AR041 | colon (9809co15) | colon (9809co15) | | | | |
| AR042 | colon cancer | colon cancer | | | | |
| AR043 | colon cancer (9808co64R) | colon cancer | | | | |
| | | (9808co64R) | | | | |
| AR044 | colon cancer 9809co14 | colon cancer | | | | |
| | | 9809co14 | | | | |
| AR045 | corn clone 5 | corn clone 5 | | | | |
| AR046 | corn clone 6 | corn clone 6 | | | | |
| AR047 | corn clone2 | corn clone2 | | | | |
| AR048 | corn clone3 | corn clone3 | | | | |
| AR049 | Corn Clone4 | Corn Clone4 | | | | |
| AR050 | Donor II B Cells 24 hrs | Donor II B Cells | | | | |
| | | 24 hrs | | | | |
| AR051 | Donor II B Cells 72 hrs | Donor II B Cells | | | | |
| | | 72 hrs | | | | |
| AR052 | Donor II B-Cells 24 hrs | Donor II B-Cells 24 | | | | |
| | | hrs | | | | |
| AR053 | Donor II B-Cells 72 hrs | Donor II B-Cells | | | | |
| | | 72 hrs | | | | |
| AR054 | Donor II Resting B Cells | Donor II Resting B | | | | |
| | | Cells | | | | |
| AR055 | Heart | Heart | | | | |
| AR056 | Human Lung (clonetech) | Human Lung | | | | |
| | | (clonetech) | | | | |
| AR057 | Human Mammary | Human Mammary | | | | |
| | (clontech) | (clontech) | | | | |
| AR058 | Human Thymus | Human Thymus | | | | |
| | (clonetech) | (clonetech) | | | | |
| AR059 | Jurkat (unstimulated) | Jurkat | | | | |
| | | (unstimulated) | | | | |
| AR060 | Kidney | Kidney | | | | |
| AR061 | Liver | Liver | | | | |
| AR062 | Liver (Clontech) | Liver (Clontech) | | | | |
| AR063 | Lymphocytes chronic | Lymphocytes | | | | |
| | lymphocytic leukaemia | chronic lymphocytic | | | | |
| | | leukaemia | | | | |
| AR064 | Lymphocytes diffuse large | Lymphocytes | | | | |
| | B cell lymphoma | diffuse large B cell | | | | |
| | | lymphoma | | | | |
| AR065 | Lymphocytes follicular | Lymphocytes | | | | |
| | lymphoma | follicular lymphoma | | | | |
| AR066 | normal breast | normal breast | | | | |
| AR067 | Normal Ovarian | Normal Ovarian | | | | |
| | (4004901) | (4004901) | | | | |
| AR068 | Normal Ovary 9508G045 | Normal Ovary | | | | |
| | | 9508G045 | | | | |
| AR069 | Normal Ovary 9701G208 | Normal Ovary | | | | |
| | | 9701G208 | | | | |
| AR070 | Normal Ovary 9806G005 | Normal Ovary | | | | |
| | | 9806G005 | | | | |
| AR071 | Ovarian Cancer | Ovarian Cancer | | | | |
| AR072 | Ovarian Cancer | Ovarian Cancer | | | | |
| | (9702G001) | (9702G001) | | | | |
| AR073 | Ovarian Cancer | Ovarian Cancer | | | | |
| | (9707G029) | (9707G029) | | | | |
| AR074 | Ovarian Cancer | Ovarian Cancer | | | | |
| | (9804G011) | (9804G011) | | | | |
| AR075 | Ovarian Cancer | Ovarian Cancer | | | | |
| | (9806G019) | (9806G019) | | | | |
| AR076 | Ovarian Cancer | Ovarian Cancer | | | | |
| | (9807G017) | (9807G017) | | | | |
| AR077 | Ovarian Cancer | Ovarian Cancer | | | | |
| | (9809G001) | (9809G001) | | | | |
| AR078 | ovarian cancer 15799 | ovarian cancer | | | | |
| | | 15799 | | | | |
| AR079 | Ovarian Cancer | Ovarian Cancer | | | | |
| | 17717AID | 17717AID | | | | |
| AR080 | Ovarian Cancer | Ovarian Cancer | | | | |
| | 4004664B1 | 4004664B1 | | | | |
| AR081 | Ovarian Cancer | Ovarian Cancer | | | | |
| | 4005315A1 | 4005315A1 | | | | |
| AR082 | ovarian cancer 94127303 | ovarian cancer | | | | |
| | | 94127303 | | | | |
| AR083 | Ovarian Cancer 96069304 | Ovarian Cancer | | | | |
| | | 96069304 | | | | |
| AR084 | Ovarian Cancer 9707G029 | Ovarian Cancer | | | | |
| | | 9707G029 | | | | |
| AR085 | Ovarian Cancer 9807G045 | Ovarian Cancer | | | | |
| | | 9807G045 | | | | |
| AR086 | ovarian cancer 9809G001 | ovarian cancer | | | | |
| | | 9809G001 | | | | |
| AR087 | Ovarian Cancer | Ovarian Cancer | | | | |
| | 9905C032RC | 9905C032RC | | | | |
| AR088 | Ovarian cancer 9907 C00 | Ovarian cancer 9907 | | | | |
| | 3rd | C00 3rd | | | | |
| AR089 | Prostate | Prostate | | | | |
| AR090 | Prostate (clonetech) | Prostate (clonetech) | | | | |
| AR091 | prostate cancer | prostate cancer | | | | |
| AR092 | prostate cancer #15176 | prostate cancer | | | | |
| | | #15176 | | | | |
| AR093 | prostate cancer #15509 | prostate cancer | | | | |
| | | #15509 | | | | |
| AR094 | prostate cancer #15673 | prostate cancer | | | | |
| | | #15673 | | | | |
| AR095 | Small Intestine (Clontech) | Small Intestine | | | | |
| | | (Clontech) | | | | |
| AR096 | Spleen | Spleen | | | | |
| AR097 | Thymus T cells activated | Thymus T cells | | | | |
| | | activated | | | | |
| AR098 | Thymus T cells resting | Thymus T cells | | | | |
| | | resting | | | | |
| AR099 | Tonsil | Tonsil | | | | |
| AR100 | Tonsil geminal center | Tonsil geminal | | | | |
| | centroblast | center centroblast | | | | |
| AR101 | Tonsil germinal center B | Tonsil germinal | | | | |
| | cell | center B cell | | | | |
| AR102 | Tonsil lymph node | Tonsil lymph node | | | | |
| AR103 | Tonsil memory B cell | Tonsil memory B | | | | |
| | | cell | | | | |
| AR104 | Whole Brain | Whole Brain | | | | |
| AR105 | Xenograft ES-2 | Xenograft ES-2 | | | | |
| AR106 | Xenograft SW626 | Xenograft SW626 | | | | |
| H0004 | Human Adult Spleen | Human Adult | Spleen | | | Uni-ZAP XR |
| | | Spleen | | | | |
| H0008 | Whole 6 Week Old | | | | | Uni-ZAP XR |
| | Embryo | | | | | |
| H0009 | Human Fetal Brain | | | | | Uni-ZAP XR |
| H0011 | Human Fetal Kidney | Human Fetal Kidney | Kidney | | | Uni-ZAP XR |
| H0012 | Human Fetal Kidney | Human Fetal Kidney | Kidney | | | Uni-ZAP XR |
| H0013 | Human 8 Week Whole | Human 8 Week Old | Embryo | | | Uni-ZAP XR |
| | Embryo | Embryo | | | | |
| H0014 | Human Gall Bladder | Human Gall Bladder | Gall Bladder | | | Uni-ZAP XR |
| H0015 | Human Gall Bladder | Human Gall Bladder | Gall Bladder | | | Uni-ZAP XR |
| | fraction II | | | | | |
| H0020 | Human Hippocampus | Human | Brain | | | Uni-ZAP XR |
| | | Hippocampus | | | | |
| H0024 | Human Fetal Lung III | Human Fetal Lung | Lung | | | Uni-ZAP XR |
| H0025 | Human Adult Lymph | Human Adult | Lymph Node | | | Lambda ZAP II |
| | Node | Lymph Node | | | | |
| H0028 | Human Old Ovary | Human Old Ovary | Ovary | | | pBluescript |
| H0030 | Human Placenta | | | | | Uni-ZAP XR |
| H0031 | Human Placenta | Human Placenta | Placenta | | | Uni-ZAP XR |
| H0032 | Human Prostate | Human Prostate | Prostate | | | Uni-ZAP XR |
| H0033 | Human Pituitary | Human Pituitary | | | | Uni-ZAP XR |
| H0036 | Human Adult Small | Human Adult Small | Small Int. | | | Uni-ZAP XR |
| | Intestine | Intestine | | | | |
| H0038 | Human Testes | Human Testes | Testis | | | Uni-ZAP XR |
| H0039 | Human Pancreas Tumor | Human Pancreas | Pancreas | | disease | Uni-ZAP XR |
| | | Tumor | | | | |
| H0040 | Human Testes Tumor | Human Testes | Testis | | disease | Uni-ZAP XR |
| | | Tumor | | | | |
| H0041 | Human Fetal Bone | Human Fetal Bone | Bone | | | Uni-ZAP XR |
| H0042 | Human Adult Pulmonary | Human Adult | Lung | | | Uni-ZAP XR |
| | | Pulmonary | | | | |
| H0045 | Human Esophagus, | Human Esophagus, | Esophagus | | disease | Uni-ZAP XR |
| | Cancer | cancer | | | | |
| H0046 | Human Endometrial | Human Endometrial | Uterus | | disease | Uni-ZAP XR |
| | Tumor | Tumor | | | | |
| H0048 | Human Pineal Gland | Human Pineal Gland | | | | Uni-ZAP XR |
| H0050 | Human Fetal Heart | Human Fetal Heart | Heart | | | Uni-ZAP XR |
| H0051 | Human Hippocampus | Human | Brain | | | Uni-ZAP XR |
| | | Hippocampus | | | | |
| H0052 | Human Cerebellum | Human Cerebellum | Brain | | | Uni-ZAP XR |
| H0053 | Human Adult Kidney | Human Adult | Kidney | | | Uni-ZAP XR |
| | | Kidney | | | | |
| H0056 | Human Umbilical Vein, | Human Umbilical | Umbilical | | | Uni-ZAP XR |
| | Endo. remake | Vein Endothelial | vein | | | |
| | | Cells | | | | |
| H0057 | Human Fetal Spleen | | | | | Uni-ZAP XR |
| H0059 | Human Uterine Cancer | Human Uterine | Uterus | | disease | Lambda ZAP II |
| | | Cancer | | | | |
| H0060 | Human Macrophage | Human Macrophage | Blood | Cell Line | | pBluescript |
| H0063 | Human Thymus | Human Thymus | Thymus | | | Uni-ZAP XR |
| H0068 | Human Skin Tumor | Human Skin Tumor | Skin | | disease | Uni-ZAP XR |
| H0069 | Human Activated T-Cells | Activated T-Cells | Blood | Cell Line | | Uni-ZAP XR |
| H0076 | Human Membrane Bound | Human Membrane | Blood | Cell Line | | Uni-ZAP XR |
| | Polysomes | Bound Polysomes | | | | |
| H0081 | Human Fetal Epithelium | Human Fetal Skin | Skin | | | Uni-ZAP XR |
| | (Skin) | | | | | |
| H0083 | HUMAN JURKAT | Jurkat Cells | | | | Uni-ZAP XR |
| | MEMBRANE BOUND | | | | | |
| | POLYSOMES | | | | | |
| H0085 | Human Colon | Human Colon | | | | Lambda ZAP II |
| H0086 | Human epithelioid | Epithelioid | Sk Muscle | | disease | Uni-ZAP XR |
| | sarcoma | Sarcoma, muscle | | | | |
| H0087 | Human Thymus | Human Thymus | | | | pBluescript |
| H0090 | Human T-Cell Lymphoma | T-Cell Lymphoma | T-Cell | | disease | Uni-ZAP XR |
| H0099 | Human Lung Cancer, | Human Lung Cancer | Lung | | | pBluescript |
| | subtracted | | | | | |
| H0100 | Human Whole Six Week | Human Whole Six | Embryo | | | Uni-ZAP XR |
| | Old Embryo | Week Old Embryo | | | | |
| H0101 | Human 7 Weeks Old | Human Whole 7 | Embryo | | | Lambda ZAP II |
| | Embryo, subtracted | Week Old Embryo | | | | |
| H0102 | Human Whole 6 Week | Human Whole Six | Embryo | | | pBluescript |
| | Old Embryo (II), subt | Week Old Embryo | | | | |
| H0105 | Human Fetal Heart, | Human Fetal Heart | Heart | | | pBluescript |
| | subtracted | | | | | |
| H0109 | Human Macrophage, | Macrophage | Blood | Cell Line | | pBluescript |
| | subtracted | | | | | |
| H0111 | Human Placenta, | Human Placenta | Placenta | | | pBluescript |
| | subtracted | | | | | |
| H0112 | Human Parathyroid | Human Parathyroid | Parathyroid | | | pBluescript |
| | Tumor, subtracted | Tumor | | | | |
| H0116 | Human Thymus Tumor, | Human Thymus | Thymus | | | pBluescript |
| | subtracted | Tumor | | | | |
| H0123 | Human Fetal Dura Mater | Human Fetal Dura | Brain | | | Uni-ZAP XR |
| | | Mater | | | | |
| H0124 | Human | Human | Sk Muscle | | disease | Uni-ZAP XR |
| | Rhabdomyosarcoma | Rhabdomyosarcoma | | | | |
| H0125 | Cem cells cyclohexamide | Cyclohexamide | Blood | Cell Line | | Uni-ZAP XR |
| | treated | Treated Cem, Jurkat, | | | | |
| | | Raji, and Supt | | | | |
| H0130 | LNCAP untreated | LNCAP Cell Line | Prostate | Cell Line | | Uni-ZAP XR |
| H0131 | LNCAP + o.3 nM R1881 | LNCAP Cell Line | Prostate | Cell Line | | Uni-ZAP XR |
| H0134 | Raji Cells, cyclohexamide | Cyclohexamide | Blood | Cell Line | | Uni-ZAP XR |
| | treated | Treated Cem, Jurkat, | | | | |
| | | Raji, and Supt | | | | |
| H0135 | Human Synovial Sarcoma | Human Synovial | Synovium | | | Uni-ZAP XR |
| | | Sarcoma | | | | |
| H0139 | Activated T-Cells, 4 hrs. | Activated T-Cells | Blood | Cell Line | | Uni-ZAP XR |
| H0141 | Activated T-Cells, 12 hrs | Activated T-Cells | Blood | Cell Line | | Uni-ZAP XR |
| H0144 | Nine Week Old Early | 9 Wk Old Early | Embryo | | | Uni-ZAP XR |
| | Stage Human | Stage Human | | | | |
| H0149 | 7 Week Old Early Stage | Human Whole 7 | Embryo | | | Uni-ZAP XR |
| | Human, subtracted | Week Old Embryo | | | | |
| H0150 | Human Epididymus | Epididymis | Testis | | | Uni-ZAP XR |
| H0156 | Human Adrenal Gland | Human Adrenal | Adrenal | | disease | Uni-ZAP XR |
| | Tumor | Gland Tumor | Gland | | | |
| H0159 | Activated T-Cells, 8 hrs, | Activated T-Cells | Blood | Cell Line | | Uni-ZAP XR |
| | ligation 2 | | | | | |
| H0161 | Activated T-Cells, 24 hrs., | Activated T-Cells | Blood | Cell Line | | Uni-ZAP XR |
| | ligation 2 | | | | | |
| H0163 | Human Synovium | Human Synovium | Synovium | | | Uni-ZAP XR |
| H0165 | Human Prostate Cancer, | Human Prostate | Prostate | | disease | Uni-ZAP XR |
| | Stage B2 | Cancer, stage B2 | | | | |
| H0169 | Human Prostate Cancer, | Human Prostate | Prostate | | disease | Uni-ZAP XR |
| | Stage C fraction | Cancer, stage C | | | | |
| H0170 | 12 Week Old Early Stage | Twelve Week Old | Embryo | | | Uni-ZAP XR |
| | Human | Early Stage Human | | | | |
| H0171 | 12 Week Old Early Stage | Twelve Week Old | Embryo | | | Uni-ZAP XR |
| | Human, II | Early Stage Human | | | | |
| H0178 | Human Fetal Brain | Human Fetal Brain | Brain | | | Uni-ZAP XR |
| H0179 | Human Neutrophil | Human Neutrophil | Blood | Cell Line | | Uni-ZAP XR |
| H0180 | Human Primary Breast | Human Primary | Breast | | disease | Uni-ZAP XR |
| | Cancer | Breast Cancer | | | | |
| H0181 | Human Primary Breast | Human Primary | Breast | | disease | Uni-ZAP XR |
| | Cancer | Breast Cancer | | | | |
| H0182 | Human Primary Breast | Human Primary | Breast | | disease | Uni-ZAP XR |
| | Cancer | Breast Cancer | | | | |
| H0184 | Human Colon Cancer, | Human Colon | Liver | | disease | Lambda ZAP II |
| | metasticized to live | Cancer, metasticized | | | | |
| | | to liver | | | | |
| H0187 | Resting T-Cell | T Cells | Blood | Cell Line | | Lambda ZAP II |
| H0188 | Human Normal Breast | Human Normal | Breast | | | Uni-ZAP XR |
| | | Breast | | | | |
| H0189 | Human Resting | Human | Blood | Cell Line | | Uni-ZAP XR |
| | Macrophage | Macrophage/Mono- | | | | |
| | | cytes | | | | |
| H0191 | Human Activated | Human | Blood | Cell Line | | Uni-ZAP XR |
| | Macrophage (LPS), thiour | Macrophage/Monoc- | | | | |
| | | ytes | | | | |
| H0192 | Cem Cells, cyclohexamide | Cyclohexamide | Blood | Cell Line | | Uni-ZAP XR |
| | treated, subtra | Treated Cem, Jurkat, | | | | |
| | | Raji, and Supt | | | | |
| H0194 | Human Cerebellum, | Human Cerebellum | Brain | | | pBluescript |
| | subtracted | | | | | |
| H0196 | Human Cardiomyopathy, | Human | Heart | | | Uni-ZAP XR |
| | subtracted | Cardiomyopathy | | | | |
| H0204 | Human Colon Cancer, | Human Colon | Colon | | | pBluescript |
| | subtracted | Cancer | | | | |
| H0205 | Human Colon Cancer, | Human Colon | Colon | | | pBluescript |
| | differential | Cancer | | | | |
| H0208 | Early Stage Human Lung, | Human Fetal Lung | Lung | | | pBluescript |
| | subtracted | | | | | |
| H0212 | Human Prostate, | Human Prostate | Prostate | | | pBluescript |
| | subtracted | | | | | |
| H0213 | Human Pituitary, | Human Pituitary | | | | Uni-ZAP XR |
| | subtracted | | | | | |
| H0214 | Raji cells, cyclohexamide | Cyclohexamide | Blood | Cell Line | | pBluescript |
| | treated, subtracted | Treated Cem, Jurkat, | | | | |
| | | Raji, and Supt | | | | |
| H0224 | Activated T-Cells, 12 hrs, | Activated T-Cells | Blood | Cell Line | | Uni-ZAP XR |
| | subtracted | | | | | |
| H0225 | Activated T-Cells, 12 hrs, | Activated T-Cells | Blood | Cell Line | | Uni-ZAP XR |
| | differentially expressed | | | | | |
| H0231 | Human Colon, subtraction | Human Colon | | | | pBluescript |
| H0235 | Human colon cancer, | Human Colon | Liver | | | pBluescript |
| | metaticized to liver, | Cancer, metasticized | | | | |
| | subtraction | to liver | | | | |
| H0244 | Human 8 Week Whole | Human 8 Week Old | Embryo | | | Uni-ZAP XR |
| | Embryo, subtracted | Embryo | | | | |
| H0247 | Human Membrane Bound | Human Membrane | Blood | Cell Line | | Uni-ZAP XR |
| | Polysomes- Enzyme | Bound Polysomes | | | | |
| | Subtraction | | | | | |
| H0250 | Human Activated | Human Monocytes | | | | Uni-ZAP XR |
| | Monocytes | | | | | |
| H0251 | Human Chondrosarcoma | Human | Cartilage | | disease | Uni-ZAP XR |
| | | Chondrosarcoma | | | | |
| H0252 | Human Osteosarcoma | Human | Bone | | disease | Uni-ZAP XR |
| | | Osteosarcoma | | | | |
| H0253 | Human adult testis, large | Human Adult Testis | Testis | | | Uni-ZAP XR |
| | inserts | | | | | |
| H0254 | Breast Lymph node cDNA | Breast Lymph Node | Lymph Node | | | Urn ZAP XR |
| | library | | | | | |
| H0255 | breast lymph node CDNA | Breast Lymph Node | Lymph Node | | | Lambda ZAP II |
| | library | | | | | |
| H0257 | HL-60, PMA 4 H | HL-60 Cells, PMA | Blood | Cell Line | | Uni-ZAP XR |
| | | stimulated 4 H | | | | |
| H0261 | H. cerebellum, Enzyme | Human Cerebellum | Brain | | | Uni-ZAP XR |
| | subtracted | | | | | |
| H0263 | human colon cancer | Human Colon | Colon | | disease | Lambda ZAP II |
| | | Cancer | | | | |
| H0264 | human tonsils | Human Tonsil | Tonsil | | | Uni-ZAP XR |
| H0265 | Activated T-Cell | T-Cells | Blood | Cell Line | | Uni-ZAP XR |
| | (12 hs)/Thiouridine | | | | | |
| | labelledEco | | | | | |
| H0266 | Human Microvascular | HMEC | Vein | Cell Line | | Lambda ZAP II |
| | Endothelial Cells, fract. A | | | | | |
| H0268 | Human Umbilical Vein | HUVE Cells | Umbilical | Cell Line | | Lambda ZAP II |
| | Endothelial Cells, fract. A | | vein | | | |
| H0271 | Human Neutrophil, | Human Neutrophil - | Blood | Cell Line | | Uni-ZAP XR |
| | Activated | Activated | | | | |
| H0274 | Human Adult Spleen, | Human Adult | Spleen | | | Uni-ZAP XR |
| | fractionII | Spleen | | | | |
| H0280 | K562 + PMA (36 hrs) | K562 Cell line | cell line | Cell Line | | ZAP Express |
| H0284 | Human OB MG63 control | Human | Bone | Cell Line | | Uni-ZAP XR |
| | fraction I | Osteoblastoma | | | | |
| | | MG63 cell line | | | | |
| H0286 | Human OB MG63 treated | Human | Bone | Cell Line | | Uni-ZAP XR |
| | (10 nM E2) fraction I | Osteoblastoma | | | | |
| | | MG63 cell line | | | | |
| H0290 | Human OB HOS treated | Human | Bone | Cell Line | | Uni-ZAP XR |
| | (1 nM E2) fraction I | Osteoblastoma HOS | | | | |
| | | cell line | | | | |
| H0292 | Human OB HOS treated | Human | Bone | Cell Line | | Uni-ZAP XR |
| | (10 nM E2) fraction I | Osteoblastoma HOS | | | | |
| | | cell line | | | | |
| H0294 | Amniotic Cells - TNF | Amniotic Cells - | Placenta | Cell Line | | Uni-ZAP XR |
| | induced | TNF induced | | | | |
| H0300 | CD34 positive cells (Cord | CD34 Positive Cells | Cord Blood | | | ZAP Express |
| | Blood) | | | | | |
| H0305 | CD34 positive cells (Cord | CD34 Positive Cells | Cord Blood | | | ZAP Express |
| | Blood) | | | | | |
| H0306 | CD34 depleted Buffy Coat | CD34 Depleted | Cord Blood | | | ZAP Express |
| | (Cord Blood) | Buffy Coat (Cord | | | | |
| | | Blood) | | | | |
| H0309 | Human Chronic Synovitis | Synovium, Chrome | Synovium | | disease | Uni-ZAP XR |
| | | Synovitis/ | | | | |
| | | Osteoarthritis | | | | |
| H0316 | HUMAN STOMACH | Human Stomach | Stomach | | | Uni-ZAP XR |
| H0318 | HUMAN B CELL | Human B Cell | Lymph Node | | disease | Uni-ZAP XR |
| | LYMPHOMA | Lymphoma | | | | |
| H0327 | human corpus colosum | Human Corpus | Brain | | | Uni-ZAP XR |
| | | Callosum | | | | |
| H0328 | human ovarian cancer | Ovarian Cancer | Ovary | | disease | Uni-ZAP XR |
| H0329 | Dermatofibrosarcoma | Dermatofibrosarcoma | Skin | | disease | Uni-ZAP XR |
| | Protuberance | Protuberans | | | | |
| H0331 | Hepatocellular Tumor | Hepatocellular | Liver | | disease | Lambda ZAP II |
| | | Tumor | | | | |
| H0333 | Hemangiopericytoma | Hemangiopericytoma | Blood vessel | | disease | Lambda ZAP II |
| H0334 | Kidney cancer | Kidney Cancer | Kidney | | disease | Uni-ZAP XR |
| H0341 | Bone Marrow Cell Line | Bone Marrow Cell | Bone Marrow | Cell Line | | Uni-ZAP XR |
| | (RS4, 11) | Line RS4; 11 | | | | |
| H0342 | Lingual Gyrus | Lingual Gyrus | Brain | | | Uni-Zap XR |
| H0343 | stomach cancer (human) | Stomach Cancer - | | | disease | Uni-ZAP XR |
| | | 5383A (human) | | | | |
| H0344 | Adipose tissue (human) | Adipose - 6825A | | | | Uni-ZAP XR |
| | | (human) | | | | |
| H0345 | SKIN | Skin - 4000868H | Skin | | | Uni-ZAP XR |
| H0349 | human adult liver cDNA | Human Adult Liver | Liver | | | pCMVSport 1 |
| | library | | | | | |
| H0351 | Glioblastoma | Glioblastoma | Brain | | disease | Uni-ZAP XR |
| H0352 | wilm”s tumor | Wilm”s Tumor | | | disease | Uni-ZAP XR |
| H0354 | Human Leukocytes | Human Leukocytes | Blood | Cell Line | | pCMVSport 1 |
| H0355 | Human Liver | Human Liver, | | | | pCMVSport 1 |
| | | normal Adult | | | | |
| H0361 | Human rejected kidney | Human Rejected | | | disease | pBluescript |
| | | Kidney | | | | |
| H0366 | L428 cell line | L428 | | | | ZAP Express |
| H0369 | H Atrophic Endometrium | Atrophic | | | | Uni-ZAP XR |
| | | Endometrium and | | | | |
| | | myometrium | | | | |
| H0370 | H Lymph node breast | Lymph node with | | | disease | Uni-ZAP XR |
| | Cancer | Met, Breast Cancer | | | | |
| H0372 | Human Testes | Human Testes | Testis | | | pCMVSport 1 |
| H0373 | Human Heart | Human Adult Heart | Heart | | | pCMVSport 1 |
| H0375 | Human Lung | Human Lung | | | | pCMVSport 1 |
| H0376 | Human Spleen | Human Adult | Spleen | | | pCMVSport 1 |
| | | Spleen | | | | |
| H0388 | Human Rejected Kidney, | Human Rejected | | | disease | pBluescript |
| | 704 re-excision | Kidney | | | | |
| H0390 | Human Amygdala | Human Amygdala | | | disease | pBluescript |
| | Depression, re-excision | Depression | | | | |
| H0391 | H. Meningima, M6 | Human Meningima | brain | | | pSport1 |
| H0392 | H Meningima, M1 | Human Meningima | brain | | | pSport1 |
| H0393 | Fetal Liver, subtraction II | Human Fetal Liver | Liver | | | pBluescript |
| H0394 | A-14 cell line | Redd Sternberg cell | | | | ZAP Express |
| H0395 | A1-CELL LINE | Redd-Sternberg cell | | | | ZAP Express |
| H0396 | L1 Cell line | Redd-Sternberg cell | | | | ZAP Express |
| H0402 | CD34 depleted Buffy Coat | CD34 Depleted | Cord Blood | | | ZAP Express |
| | (Cord Blood), re-excision | Buffy Coat (Cord | | | | |
| | | Blood) | | | | |
| H0403 | H Umbilical Vein | HUVE Cells | Umbilical | Cell Line | | Uni-ZAP XR |
| | Endothelial Cells, IL4 | | vein | | | |
| | induced | | | | | |
| H0409 | H. Striatum Depression, | Human Brain | Brain | | | pBluescript |
| | subtracted | Striatum Depression | | | | |
| H0411 | H Female Bladder, Adult | Human Female | Bladder | | | pSport1 |
| | | Adult Bladder | | | | |
| H0412 | Human umbilical vein | HUVE Cells | Umbilical | Cell Line | | pSport1 |
| | endothelial cells, IL-4 | | vein | | | |
| | induced | | | | | |
| H0413 | Human Umbilical Vein | HUVE Cells | Umbilical | Cell Line | | pSport1 |
| | Endothelial Cells, | | vein | | | |
| | uninduced | | | | | |
| H0415 | H. Ovarian Tumor, II, | Ovarian Tumor | Ovary | | disease | pCMVSport 2.0 |
| | OV5232 | OV5232 | | | | |
| H0416 | Human Neutrophils, | Human Neutrophil - | Blood | Cell Line | | pBluescript |
| | Activated, re-excision | Activated | | | | |
| H0421 | Human Bone Marrow, re- | Bone Marrow | | | | pBluescript |
| | excision | | | | | |
| H0422 | T-Cell PHA 16 hrs | T-Cells | Blood | Cell Line | | pSport1 |
| H0423 | T-Cell PHA 24 hrs | T-Cells | Blood | Cell Line | | pSport1 |
| H0424 | Human Pituitary, subt IX | Human Pituitary | | | | pBluescript |
| H0427 | Human Adipose | Human Adipose, left | | | | pSport1 |
| | | hiplipoma | | | | |
| H0428 | Human Ovary | Human Ovary | Ovary | | | pSport1 |
| | | Tumor | | | | |
| H0431 | H. Kidney Medulla, re- | Kidney medulla | Kidney | | | pBluescript |
| | excision | | | | | |
| H0433 | Human Umbilical Vein | HUVE Cells | Umbilical | Cell Line | | pBluescript |
| | Endothelial cells, frac B, | | vein | | | |
| | re-excision | | | | | |
| H0434 | Human Brain, striatum, | Human Brain, | | | | pBluescript |
| | re-excision | Striatum | | | | |
| H0435 | Ovarian Tumor Oct. 3, 1995 | Ovarian Tumor, | Ovary | | | pCMVSport 2.0 |
| | | OV350721 | | | | |
| H0436 | Resting T-Cell Library, II | T-Cells | Blood | Cell Line | | pSport1 |
| H0437 | H Umbilical Vein | HUVE Cells | Umbilical | Cell Line | | Lambda ZAP II |
| | Endothelial Cells, frac A, | | vein | | | |
| | re-excision | | | | | |
| H0438 | H. Whole Brain #2, re- | Human Whole Brain | | | | ZAP Express |
| | excision | #2 | | | | |
| H0439 | Human Eosinophils | Eosinophils | | | | pBluescript |
| H0441 | H. Kidney Cortex, | Kidney cortex | Kidney | | | pBluescript |
| | subtracted | | | | | |
| H0442 | H. Striatum Depression, | Human Brain, | Brain | | | pBluescript |
| | subt II | Striatum Depression | | | | |
| H0444 | Spleen metastic melanoma | Spleen, Metastic | Spleen | | disease | pSport1 |
| | | malignant | | | | |
| | | melanoma | | | | |
| H0445 | Spleen, Chronic | Human Spleen, CLL | Spleen | | disease | pSport1 |
| | lymphocytic leukemia | | | | | |
| H0455 | H. Striatum Depression, | Human Brain, | Brain | | | pBluescript |
| | subt | Striatum Depression | | | | |
| H0457 | Human Eosinophils | Human Eosinophils | | | | pSport1 |
| H0459 | CD34+ cells, II, | CD34 positive cells | | | | pCMVSport 2.0 |
| | FRACTION 2 | | | | | |
| H0477 | Human Tonsil, Lib 3 | Human Tonsil | Tonsil | | | pSport1 |
| H0478 | Salivary Gland, Lib 2 | Human Salivary | Salivary | | | pSport1 |
| | | Gland | gland | | | |
| H0483 | Breast Cancer cell line, | Breast Cancer Cell | | | | pSport1 |
| | MDA 36 | line MDA 36 | | | | |
| H0484 | Breast Cancer Cell line, | Breast Cancer Cell | | | | pSport1 |
| | angiogenic | line, Angiogenic, | | | | |
| | | 36T3 | | | | |
| H0485 | Hodgkin”s Lymphoma I | Hodgkin”s | | | disease | pCMVSport 2.0 |
| | | Lymphoma I | | | | |
| H0486 | Hodgkin”s Lymphoma II | Hodgkin”s | | | disease | pCMVSport 2.0 |
| | | Lymphoma II | | | | |
| H0487 | Human Tonsils, lib I | Human Tonsils | | | | pCMVSport 2.0 |
| H0488 | Human Tonsils, Lib 2 | Human Tonsils | | | | pCMVSport 2.0 |
| H0489 | Crohn”s Disease | Ileum | Intestine | | disease | pSport1 |
| H0492 | HL-60, RA 4 h, Subtracted | HL-60 Cells, RA | Blood | Cell Line | | Uni-ZAP XR |
| | | stimulated for 4 H | | | | |
| H0494 | Keratinocyte | Keratinocyte | | | | pCMVSport 2.0 |
| H0497 | HEL cell line | HEL cell line | | HEL | | pSport1 |
| | | | | 92 1.7 | | |
| H0505 | Human Astrocyte | Human Astrocyte | | | | pSport1 |
| H0506 | Ulcerative Colitis | Colon | Colon | | | pSport1 |
| H0509 | Liver, Hepatoma | Human Liver, | Liver | | disease | pCMVSport 3.0 |
| | | Hepatoma, patient 8 | | | | |
| H0510 | Human Liver, normal | Human Liver, | Liver | | | pCMVSport 3.0 |
| | | normal, Patient # 8 | | | | |
| H0518 | pBMC stimulated w/ poly | pBMC stimulated | | | | pCMVSport 3.0 |
| | I/C | with poly I/C | | | | |
| H0519 | NTERA2, control | NTERA2, | | | | pCMVSport 3.0 |
| | | Teratocarcinoma | | | | |
| | | cell line | | | | |
| H0520 | NTERA2 + retinoic acid, | NTERA2, | | | | pSport1 |
| | 14 days | Teratocarcinoma | | | | |
| | | cell line | | | | |
| H0521 | Primary Dendritic Cells, | Primary Dendritic | | | | pCMVSport 3.0 |
| | lib 1 | cells | | | | |
| H0522 | Primary Dendritic | Primary Dendritic | | | | pCMVSport 3.0 |
| | cells, frac 2 | cells | | | | |
| H0529 | Myoloid Progenitor Cell | TF-1 Cell Line, | | | | pCMVSport 3.0 |
| | Line | Myoloid progenitor | | | | |
| | | cell line | | | | |
| H0538 | Merkel Cells | Merkel cells | Lymph node | | | pSport1 |
| H0539 | Pancreas Islet Cell Tumor | Pancreas Islet Cell | Pancreas | | disease | pSport1 |
| | | Tumour | | | | |
| H0542 | T Cell helper I | Helper T cell | | | | pCMVSport 3.0 |
| H0543 | T cell helper II | Helper T cell | | | | pCMVSport 3.0 |
| H0544 | Human endometrial | Human Endometrial | | | | pCMVSport 3.0 |
| | stromal cells | stromal cells | | | | |
| H0545 | Human endometrial | Human endometrial | | | | pCMVSport 3.0 |
| | stromal cells-treated with | stromal cells-treated | | | | |
| | progesterone | with proge | | | | |
| H0546 | Human endometrial | Human endometrial | | | | pCMVSport 3.0 |
| | stromal cells-treated with | stromal cells-treated | | | | |
| | estradiol | with estra | | | | |
| H0547 | NTERA2 teratocarcinoma | NTERA2, | | | | pSport1 |
| | cell line + retinoic acid (14 | Teratocarcinoma | | | | |
| | days) | cell line | | | | |
| H0549 | H. Epididiymus, caput & | Human | | | | Uni-ZAP XR |
| | corpus | Epididiymus, caput | | | | |
| | | and corpus | | | | |
| H0550 | H. Epididiymus, cauda | Human | | | | Uni-ZAP XR |
| | | Epididiymus, cauda | | | | |
| H0551 | Human Thymus Stromal | Human Thymus | | | | pCMVSport 3.0 |
| | Cells | Stromal Cells | | | | |
| H0553 | Human Placenta | Human Placenta | | | | pCMVSport 3.0 |
| H0555 | Rejected Kidney, lib 4 | Human Rejected | Kidney | | disease | pCMVSport 3.0 |
| | | Kidney | | | | |
| H0556 | Activated T- | T-Cells | Blood | Cell Line | | Uni-ZAP XR |
| | cell(12 h)/Thiouridine-re- | | | | | |
| | excision | | | | | |
| H0559 | HL-60, PMA 4 H, re- | HL-60 Cells, PMA | Blood | Cell Line | | Uni-ZAP XR |
| | excision | stimulated 4 H | | | | |
| H0560 | KMH2 | KMH2 | | | | pCMVSport 3.0 |
| H0561 | L428 | L428 | | | | pCMVSport 3.0 |
| H0567 | Human Fetal Brain, | Human Fetal Brain | | | | pCMVSport 2.0 |
| | normalized A5002F | | | | | |
| H0570 | Human Fetal Brain, | Human Fetal Brain | | | | pCMVSport 2.0 |
| | normalized C500H | | | | | |
| H0571 | Human Fetal Brain, | Human Fetal Brain | | | | pCMVSport 2.0 |
| | normalized C500HE | | | | | |
| H0574 | Hepatocellular Tumor; re- | Hepatocellular | Liver | | disease | Lambda ZAP II |
| | excision | Tumor | | | | |
| H0575 | Human Adult | Human Adult | Lung | | | Uni-ZAP XR |
| | Pulmonary; re-excision | Pulmonary | | | | |
| H0576 | Resting T-Cell; re- | T-Cells | Blood | Cell Line | | Lambda ZAP II |
| | excision | | | | | |
| H0579 | Pericardium | Pericardium | Heart | | | pSport1 |
| H0580 | Dendritic cells, pooled | Pooled dendritic | | | | pCMVSport 3.0 |
| | | cells | | | | |
| H0581 | Human Bone Marrow, | Human Bone | Bone Marrow | | | pCMVSport 3.0 |
| | treated | Marrow | | | | |
| H0583 | B Cell lymphoma | B Cell Lymphoma | B Cell | | disease | pCMVSport 3.0 |
| H0584 | Activated T-cells, 24 | Activated T-Cells | Blood | Cell Line | | Uni-ZAP XR |
| | hrs, re-excision | | | | | |
| H0585 | Activated T-Cells, 12 | Activated T-Cells | Blood | Cell Line | | Uni-ZAP XR |
| | hrs, re-excision | | | | | |
| H0586 | Healing groin wound, 6.5 | healing groin | groin | | disease | pCMVSport 3.0 |
| | hours post incision | wound, 6.5 hours | | | | |
| | | post incision - 2/ | | | | |
| H0587 | Healing groin wound; 7.5 | Groin-Feb. 19, 1997 | groin | | disease | pCMVSport 3.0 |
| | hours post incision | | | | | |
| H0590 | Human adult small | Human Adult Small | Small Int. | | | Uni-ZAP XR |
| | intestine, re-excision | Intestine | | | | |
| H0591 | Human T-cell | T-Cell Lymphoma | T-Cell | | disease | Uni-ZAP XR |
| | lymphoma, re-excision | | | | | |
| H0592 | Healing groin wound - | HGS wound healing | | | disease | pCMVSport 3.0 |
| | zero hr post-incision | project; abdomen | | | | |
| | (control) | | | | | |
| H0593 | Olfactory | Olfactory epithelium | | | | pCMVSport 3.0 |
| | epithelium, nasal cavity | from roof of left | | | | |
| | | nasal cacit | | | | |
| H0594 | Human Lung Cancer; re- | Human Lung Cancer | Lung | | disease | Lambda ZAP II |
| | excision | | | | | |
| H0595 | Stomach cancer | Stomach Cancer - | | | disease | Uni-ZAP XR |
| | (human), re-excision | 5383A (human) | | | | |
| H0596 | Human Colon Cancer; re- | Human Colon | Colon | | | Lambda ZAP II |
| | excision | Cancer | | | | |
| H0597 | Human Colon, re-excision | Human Colon | | | | Lambda ZAP II |
| H0598 | Human Stomach, re- | Human Stomach | Stomach | | | Uni-ZAP XR |
| | excision | | | | | |
| H0599 | Human Adult Heart, re- | Human Adult Heart | Heart | | | Uni-ZAP XR |
| | excision | | | | | |
| H0600 | Healing Abdomen | Abdomen | | | disease | pCMVSport 3.0 |
| | wound; 70&90 min post | | | | | |
| | incision | | | | | |
| H0601 | Healing Abdomen | Abdomen | | | disease | pCMVSport 3.0 |
| | Wound, 15 days post | | | | | |
| | incision | | | | | |
| H0604 | Human Pituitary, re- | Human Pituitary | | | | pBluescript |
| | excision | | | | | |
| H0606 | Human Primary Breast | Human Primary | Breast | | disease | Uni-ZAP XR |
| | Cancer; re-excision | Breast Cancer | | | | |
| H0608 | H. Leukocytes, control | H. Leukocytes | | | | pCMVSport 1 |
| H0615 | Human Ovarian Cancer | Ovarian Cancer | Ovary | | disease | Uni-ZAP XR |
| | Reexcision | | | | | |
| H0616 | Human Testes, Reexcision | Human Testes | Testis | | | Uni-ZAP XR |
| H0617 | Human Primary Breast | Human Primary | Breast | | disease | Uni-ZAP XR |
| | Cancer Reexcision | Breast Cancer | | | | |
| H0618 | Human Adult Testes, | Human Adult Testis | Testis | | | Uni-ZAP XR |
| | Large Inserts, Reexcision | | | | | |
| H0619 | Fetal Heart | Human Fetal Heart | Heart | | | Uni-ZAP XR |
| H0620 | Human Fetal Kidney; | Human Fetal Kidney | Kidney | | | Uni-ZAP XR |
| | Reexcision | | | | | |
| H0622 | Human Pancreas Tumor; | Human Pancreas | Pancreas | | disease | Uni-ZAP XR |
| | Reexcision | Tumor | | | | |
| H0623 | Human Umbilical Vein, | Human Umbilical | Umbilical | | | Uni-ZAP XR |
| | Reexcision | Vein Endothelial | vein | | | |
| | | Cells | | | | |
| H0624 | 12 Week Early Stage | Twelve Week Old | Embryo | | | Uni-ZAP XR |
| | Human II, Reexcision | Early Stage Human | | | | |
| H0625 | Ku 812F Basophils Line | Ku 812F Basophils | | | | pSport1 |
| H0626 | Saos2 Cells; Untreated | Saos2 Cell Line; | | | | pSport1 |
| | | Untreated | | | | |
| H0628 | Human Pre-Differentiated | Human Pre- | | | | Uni-ZAP XR |
| | Adipocytes | Differentiated | | | | |
| | | Adipocytes | | | | |
| H0629 | Human Leukocyte, control | Human Normalized | | | | pCMVSport 1 |
| | #2 | leukocyte | | | | |
| H0630 | Human | Human Normalized | | | | pCMVSport 1 |
| | Leukocytes, normalized | leukocyte | | | | |
| | control #4 | | | | | |
| H0631 | Saos2 Dexamethosome | Saos2 Cell Line; | | | | pSport1 |
| | Treated | Dexamethosome | | | | |
| | | Treated | | | | |
| H0632 | Hepatocellular Tumor, re- | Hepatocellular | Liver | | | Lambda ZAP II |
| | excision | Tumor | | | | |
| H0633 | Lung Carcinoma A549 | TNFalpha activated | | | disease | pSport1 |
| | TNFalpha activated | A549--Lung | | | | |
| | | Carcinoma | | | | |
| H0634 | Human Testes Tumor, re- | Human Testes | Testis | | disease | Uni-ZAP XR |
| | excision | Tumor | | | | |
| H0635 | Human Activated T-Cells, | Activated T-Cells | Blood | Cell Line | | Uni-ZAP XR |
| | re-excision | | | | | |
| H0638 | CD40 activated monocyte | CD40 activated | | | | pSport1 |
| | dendridic cells | monocyte dendridic | | | | |
| | | cells | | | | |
| H0640 | Ficolled Human Stromal | Ficolled Human | | | | Other |
| | Cells, Untreated | Stromal Cells, | | | | |
| | | Untreated | | | | |
| H0641 | LPS activated derived | LPS activated | | | | pSport1 |
| | dendritic cells | monocyte derived | | | | |
| | | dendritic cells | | | | |
| H0642 | Hep G2 Cells, lambda | Hep G2 Cells | | | | Other |
| | library | | | | | |
| H0643 | Hep G2 Cells PCR library | Hep G2 Cells | | | | Other |
| H0644 | Human Placenta (re- | Human Placenta | Placenta | | | Uni-ZAP XR |
| | excision) | | | | | |
| H0645 | Fetal Heart re-excision | Human Fetal Heart | Heart | | | Uni-ZAP XR |
| H0646 | Lung, Cancer (4005313 | Metastatic | | | | pSport1 |
| | A3): Invasive Poorly | squamous cell lung | | | | |
| | Differentiated Lung | carcinoma, poorly di | | | | |
| | Adenocarcinoma, | | | | | |
| H0647 | Lung, Cancer (4005163 | Invasive poorly | | | disease | pSport1 |
| | B7) Invasive, Poorly Diff | differentiated lung | | | | |
| | Adenocarcinoma, | adenocarcinoma | | | | |
| | Metastatic | | | | | |
| H0648 | Ovary, Cancer (4004562 | Papillary Cstic | | | disease | pSport1 |
| | B6) Papillary Serous | neoplasm of low | | | | |
| | Cystic Neoplasm, Low | malignant potentia | | | | |
| | Malignant Pot | | | | | |
| H0649 | Lung, Normal. (4005313 | Normal Lung | | | | pSport1 |
| | B1) | | | | | |
| H0650 | B-Cells | B-Cells | | | | pCMVSport 3.0 |
| H0651 | Ovary, Normal: | Normal Ovary | | | | pSport1 |
| | (9805C040R) | | | | | |
| H0652 | Lung, Normal. (4005313 | Normal Lung | | | | pSport1 |
| | B1) | | | | | |
| H0653 | Stromal Cells | Stromal Cells | | | | pSport1 |
| H0654 | Lung, Cancer (4005313 | Metastatic | | | | Other |
| | A3) Invasive Poorly- | Squamous cell lung | | | | |
| | differentiated Metastatic | Carcinoma poorly | | | | |
| | lung adenoc | dif | | | | |
| H0656 | B-cells (unstimulated) | B-cells | | | | pSport1 |
| | | (unstimulated) | | | | |
| H0657 | B-cells (stimulated) | B-cells (stimulated) | | | | pSport1 |
| H0658 | Ovary, Cancer | 9809C332- Poorly | Ovary & | | disease | pSport1 |
| | (9809C332) Poorly | differentiate | Fallopian | | | |
| | differentiated | | Tubes | | | |
| | adenocarcinoma | | | | | |
| H0659 | Ovary, Cancer | Grade II Papillary | Ovary | | disease | pSport1 |
| | (15395A1F): Grade II | Carcinoma, Ovary | | | | |
| | Papillary Carcinoma | | | | | |
| H0660 | Ovary, Cancer: | Poorly differentiated | | | disease | pSport1 |
| | (15799A1F) Poorly | carcinoma, ovary | | | | |
| | differentiated carcinoma | | | | | |
| H0661 | Breast, Cancer (4004943 | Breast cancer | | | disease | pSport1 |
| | A5) | | | | | |
| H0662 | Breast, Normal: | Normal Breast - | Breast | | | pSport1 |
| | (4005522B2) | #4005522(B2) | | | | |
| H0663 | Breast, Cancer (4005522 | Breast Cancer - | Breast | | disease | pSport1 |
| | A2) | #4005522(A2) | | | | |
| H0664 | Breast, Cancer: | Breast Cancer | Breast | | disease | pSport1 |
| | (9806C012R) | | | | | |
| H0665 | Stromal cells 3.88 | Stromal cells 3.88 | | | | pSport1 |
| H0666 | Ovary, Cancer (4004332 | Ovarian Cancer, | | | disease | pSport1 |
| | A2) | Sample# 4004332A2 | | | | |
| H0667 | Stromal cells(HBM3.18) | Stromal cell(HBM | | | | pSport1 |
| | | 3.18) | | | | |
| H0668 | stromal cell clone 2.5 | stromal cell clone | | | | pSport1 |
| | | 2.5 | | | | |
| H0670 | Ovary, Cancer(4004650 | Ovarian Cancer - | | | | pSport1 |
| | A3) Well-Differentiated | 4004650A3 | | | | |
| | Micropapillary Serous | | | | | |
| | Carcinoma | | | | | |
| H0671 | Breast, Cancer | Breast Cancer- | | | | pSport1 |
| | (9802C02OE) | Sample # | | | | |
| | | 9802C02OE | | | | |
| H0672 | Ovary, Cancer: (4004576 | Ovarian | Ovary | | | pSport1 |
| | A8) | Cancer(4004576A8) | | | | |
| H0673 | Human Prostate Cancer, | Human Prostate | Prostate | | | Uni-ZAP XR |
| | Stage B2 re-excision | Cancer, stage B2 | | | | |
| H0674 | Human Prostate Cancer, | Human Prostate | Prostate | | | Uni-ZAP XR |
| | Stage C, re-excission | Cancer, stage C | | | | |
| H0675 | Colon, Cancer: | Colon Cancer | | | | pCMVSport 3.0 |
| | (9808C064R) | 9808C064R | | | | |
| H0677 | TNFR degenerate oligo | B-Cells | | | | PCRII |
| H0682 | Serous Papillary | serous papillary | | | | pCMVSport 3.0 |
| | Adenocarcinoma | adenocarcinoma | | | | |
| | | (9606G304SPA3B) | | | | |
| H0683 | Ovarian Serous Papillary | Serous papillary | | | | pCMVSport 3.0 |
| | Adenocarcinoma | adenocarcinoma, | | | | |
| | | stage 3C(9804G01 | | | | |
| H0684 | Serous Papillary | Ovarian Cancer | Ovaries | | | pCMVSport 3.0 |
| | Adenocarcinoma | 9810G606 | | | | |
| H0685 | Adenocarcinoma of | Adenocarcinoma of | | | | pCMVSport 3.0 |
| | Ovary, Human Cell Line, | Ovary, Human Cell | | | | |
| | # OVCAR-3 | Line, # OVCAR- | | | | |
| H0686 | Adenocarcinoma of | Adenocarcinoma of | | | | pCMVSport 3.0 |
| | Ovary, Human Cell Line | Ovary, Human Cell | | | | |
| | | Line, # SW-626 | | | | |
| H0687 | Human normal | Human normal | Ovary | | | pCMVSport 3.0 |
| | ovary(#9610G215) | ovary(#9610G215) | | | | |
| H0688 | Human Ovarian | Human Ovarian | | | | pCMVSport 3.0 |
| | Cancer(#9807G017) | cancer(#9807G017), | | | | |
| | | mRNA from Maura | | | | |
| | | Ru | | | | |
| H0689 | Ovarian Cancer | Ovarian Cancer, | | | | pCMVSport 3.0 |
| | | #9806G019 | | | | |
| H0690 | Ovarian Cancer, # | Ovarian Cancer, | | | | pCMVSport 3.0 |
| | 9702G001 | #9702G001 | | | | |
| H0691 | Normal Ovary, | normal ovary, | | | | pCMVSport 3.0 |
| | #9710G208 | #9710G208 | | | | |
| H0693 | Normal Prostate | Normal Prostate | | | | pCMVSport 3.0 |
| | #ODQ3958EN | Tissue # | | | | |
| | | ODQ3958EN | | | | |
| H0694 | Prostate gland | Prostate gland, | prostate | | | pCMVSport 3.0 |
| | adenocarcinoma | Adenocarcinoma, | gland | | | |
| | | mod/diff, gleason | | | | |
| H0695 | mononucleocytes from | mononucleocytes | | | | pCMVSport 3.0 |
| | patient | from patient at | | | | |
| | | Shady Grove Hospit | | | | |
| N0006 | Human Fetal Brain | Human Fetal Brain | | | | |
| N0009 | Human Hippocampus, | Human | | | | |
| | prescreened | Hippocampus | | | | |
| S0002 | Monocyte activated | Monocyte-activated | blood | Cell Line | | Uni-ZAP XR |
| S0003 | Human Osteoclastoma | Osteoclastoma | bone | | disease | Uni-ZAP XR |
| S0005 | Heart | Heart-left ventricle | Heart | | | pCDNA |
| S0007 | Early Stage Human Brain | Human Fetal Brain | | | | Uni-ZAP XR |
| S0010 | Human Amygdala | Amygdala | | | | Uni-ZAP XR |
| S0011 | STROMAL - | Osteoclastoma | bone | | disease | Uni-ZAP XR |
| | OSTEOCLASTOMA | | | | | |
| S0022 | Human Osteoclastoma | Osteoclastoma | | | | Uni-ZAP XR |
| | Stromal Cells - | Stromal Cells | | | | |
| | unamplified | | | | | |
| S0024 | Human Kidney Medulla - | Human Kidney | | | | |
| | unamplified | Medulla | | | | |
| S0026 | Stromal cell TF274 | stromal cell | Bone marrow | Cell Line | | Uni-ZAP XR |
| S0027 | Smooth muscle, serum | Smooth muscle | Pulmanary | Cell Line | | Uni-ZAP XR |
| | treated | | artery | | | |
| S0028 | Smooth muscle, control | Smooth muscle | Pulmanary | Cell Line | | Uni-ZAP XR |
| | | | artery | | | |
| S0029 | brain stem | Brain stem | brain | | | Uni-ZAP XR |
| S0031 | Spinal cord | Spinal cord | spinal cord | | | Uni-ZAP XR |
| S0032 | Smooth muscle-ILb | Smooth muscle | Pulmanary | Cell Line | | Uni-ZAP XR |
| | induced | | artery | | | |
| S0036 | Human Substantia Nigra | Human Substantia | | | | Uni-ZAP XR |
| | | Nigra | | | | |
| S0037 | Smooth muscle, IL1b | Smooth muscle | Pulmanary | Cell Line | | Uni-ZAP XR |
| | induced | | artery | | | |
| S0038 | Human Whole Brain #2 - | Human Whole Brain | | | | ZAP Express |
| | Oligo dT > 1.5 Kb | #2 | | | | |
| S0040 | Adipocytes | Human Adipocytes | | | | Uni-ZAP XR |
| | | from Osteoclastoma | | | | |
| S0044 | Prostate BPH | prostate BPH | Prostate | | disease | Uni-ZAP XR |
| S0045 | Endothelial cells-control | Endothelial cell | endothelial | Cell Line | | Uni-ZAP XR |
| | | | cell-lung | | | |
| S0046 | Endothelial-induced | Endothelial cell | endothelial | Cell Line | | Uni-ZAP XR |
| | | | cell-lung | | | |
| S0049 | Human Brain, Striatum | Human Brain, | | | | Uni-ZAP XR |
| | | Striatum | | | | |
| S0050 | Human Frontal Cortex, | Human Frontal | | | disease | Uni-ZAP XR |
| | Schizophrenia | Cortex, | | | | |
| | | Schizophrenia | | | | |
| S0051 | Human | Human | | | disease | Uni-ZAP XR |
| | Hypothalmus, Schizophrenia | Hypothalamus, | | | | |
| | | Schizophrenia | | | | |
| S0052 | neutrophils control | human neutrophils | blood | Cell Line | | Uni-ZAP XR |
| S0053 | Neutrophils IL-1 and LPS | human neutrophil | blood | Cell Line | | Uni-ZAP XR |
| | induced | induced | | | | |
| S0106 | STRIATUM | | BRAIN | | disease | Uni-ZAP XR |
| | DEPRESSION | | | | | |
| S0114 | Anergic T-cell | Anergic T-cell | | Cell Line | | Uni-ZAP XR |
| S0116 | Bone marrow | Bone marrow | Bone marrow | | | Uni-ZAP XR |
| S0118 | Smooth muscle control 2 | Smooth muscle | Pulmanary | Cell Line | | Uni-ZAP XR |
| | | | artery | | | |
| S0122 | Osteoclastoma-normalized | Osteoclastoma | bone | | disease | pBluescript |
| | A | | | | | |
| S0126 | Osteoblasts | Osteoblasts | Knee | Cell Line | | Uni-ZAP XR |
| S0132 | Epithelial-TNFa and INF | Airway Epithelial | | | | Uni-ZAP XR |
| | induced | | | | | |
| S0134 | Apoptotic T-cell | apoptotic cells | | Cell Line | | Uni-ZAP XR |
| S0140 | eosinophil-IL5 induced | eosinophil | lung | Cell Line | | Uni-ZAP XR |
| S0142 | Macrophage oxLDL | macrophage- | blood | Cell Line | | Uni-ZAP XR |
| | | oxidized LDL | | | | |
| | | treated | | | | |
| S0144 | Macrophage (GM-CSF | Macrophage (GM- | | | | Uni-ZAP XR |
| | treated) | CSF treated) | | | | |
| S0146 | prostate-edited | prostate BPH | Prostate | | | Uni-ZAP XR |
| S0148 | Normal Prostate | Prostate | prostate | | | Uni-ZAP XR |
| S0150 | LNCAP prostate cell line | LNCAP Cell Line | Prostate | Cell Line | | Uni-ZAP XR |
| S0152 | PC3 Prostate cell line | PC3 prostate cell | | | | Uni-ZAP XR |
| | | line | | | | |
| S0174 | Prostate-BPH subtracted II | Human Prostate | | | | pBluescript |
| | | BPH | | | | |
| S0182 | Human B Cell 8866 | Human B- Cell 8866 | | | | Uni-ZAP XR |
| S0188 | Prostate, BPH, Lib 2 | Human Prostate | | | disease | pSport1 |
| | | BPH | | | | |
| S0190 | Prostate BPH, Lib 2, | Human Prostate | | | | pSport1 |
| | subtracted | BPH | | | | |
| S0192 | Synovial Fibroblasts | Synovial Fibroblasts | | | | pSport1 |
| | (control) | | | | | |
| S0194 | Synovial hypoxia | Synovial Fibroblasts | | | | pSport1 |
| S0196 | Synovial IL-1/TNF | Synovial Fibroblasts | | | | pSport1 |
| | stimulated | | | | | |
| S0206 | Smooth Muscle- HASTE | Smooth muscle | Pulmanary | Cell Line | | pBluescript |
| | normalized | | artery | | | |
| S0210 | Messangial cell, frac 2 | Messangial cell | | | | pSport1 |
| S0212 | Bone Marrow Stromal | Bone Marrow | | | | pSport1 |
| | Cell, untreated | Stromal | | | | |
| | | Cell, untreated | | | | |
| S0214 | Human Osteoclastoma, re- | Osteoclastoma | bone | | disease | Uni-ZAP XR |
| | excision | | | | | |
| S0216 | Neutrophils IL-1 and LPS | human neutrophil | blood | Cell Line | | Uni-ZAP XR |
| | induced | induced | | | | |
| S0218 | Apoptotic T-cell, re-excision | apoptotic cells | | Cell Line | | Uni-ZAP XR |
| S0222 | H. Frontal | H Brain, Frontal | Brain | | disease | Uni-ZAP XR |
| | cortex, epileptic, re-excision | Cortex, Epileptic | | | | |
| S0242 | Synovial Fibroblasts | Synovial Fibroblasts | | | | pSport1 |
| | (Il1/TNF), subt | | | | | |
| S0250 | Human Osteoblasts II | Human Osteoblasts | Femur | | disease | pCMVSport 2.0 |
| S0260 | Spinal Cord, re-excision | Spinal cord | spinal cord | | | Uni-ZAP XR |
| S0276 | Synovial hypoxia-RSF | Synovial fobroblasts | Synovial | | | pSport1 |
| | subtracted | (rheumatoid) | tissue | | | |
| S0278 | H Macrophage (GM-CSF | Macrophage (GM- | | | | Uni-ZAP XR |
| | treated), re-excision | CSF treated) | | | | |
| S0280 | Human Adipose Tissue, | Human Adipose | | | | Uni-ZAP XR |
| | re-excision | Tissue | | | | |
| S0282 | Brain Frontal Cortex, re- | Brain frontal cortex | Brain | | | Lambda ZAP II |
| | excision | | | | | |
| S0294 | Larynx tumor | Larynx tumor | Larynx, vocal | | disease | pSport1 |
| | | | cord | | | |
| S0300 | Frontal lobe, dementia; re- | Frontal Lobe | Brain | | | Uni-ZAP XR |
| | excision | dementia/Alzheimer”s | | | | |
| S0306 | Larynx normal #10 261-273 | Larynx normal | | | | pSport1 |
| S0308 | Spleen/normal | Spleen normal | | | | pSport1 |
| S0312 | Human | Human | | | disease | pSport1 |
| | osteoarthritic; fraction II | osteoarthritic | | | | |
| | | cartilage | | | | |
| S0314 | Human | Human | | | disease | pSport1 |
| | osteoarthritis; fraction I | osteoarthritic | | | | |
| | | cartilage | | | | |
| S0316 | Human Normal | Human Normal | | | | pSport1 |
| | Cartilage, Fraction I | Cartilage | | | | |
| S0322 | Siebben Polyposis | Siebben Polyposis | | | | pSport1 |
| S0328 | Palate carcinoma | Palate carcinoma | Uvula | | disease | pSport1 |
| S0330 | Palate normal | Palate normal | Uvula | | | pSport1 |
| S0332 | Pharynx carcinoma | Pharynx carcinoma | Hypopharynx | | | pSport1 |
| S0342 | Adipocytes; re-excision | Human Adipocytes | | | | Uni-ZAP XR |
| | | from Osteoclastoma | | | | |
| S0344 | Macrophage-oxLDL, re-excision | macrophage- | blood | Cell Line | | Uni-ZAP XR |
| | | oxidized LDL | | | | |
| | | treated | | | | |
| S0346 | Human Amygdala, re- | Amygdala | | | | Uni-ZAP XR |
| | excision | | | | | |
| S0350 | Pharynx Carcinoma | Pharynx carcinoma | Hypopharynx | | disease | pSport1 |
| S0352 | Larynx Carcinoma | Larynx carcinoma | | | disease | pSport1 |
| S0354 | Colon Normal II | Colon Normal | Colon | | | pSport1 |
| S0356 | Colon Carcinoma | Colon Carcinoma | Colon | | disease | pSport1 |
| S0358 | Colon Normal III | Colon Normal | Colon | | | pSport1 |
| S0360 | Colon Tumor II | Colon Tumor | Colon | | disease | pSport1 |
| S0364 | Human Quadriceps | Quadriceps muscle | | | | pSport1 |
| S0366 | Human Soleus | Soleus Muscle | | | | pSport1 |
| S0370 | Larynx carcinoma II | Larynx carcinoma | | | disease | pSport1 |
| S0372 | Larynx carcinoma III | Larynx carcinoma | | | disease | pSport1 |
| S0374 | Normal colon | Normal colon | | | | pSport1 |
| S0376 | Colon Tumor | Colon Tumor | | | disease | pSport1 |
| S0378 | Pancreas normal PCA4 | Pancreas Normal | | | | pSport1 |
| | No | PCA4 No | | | | |
| S0380 | Pancreas Tumor PCA4 Tu | Pancreas Tumor | | | disease | pSport1 |
| | | PCA4 Tu | | | | |
| S0382 | Larynx carcinoma IV | Larynx carcinoma | | | disease | pSport1 |
| S0384 | Tongue carcinoma | Tongue carcinoma | | | disease | pSport1 |
| S0388 | Human | Human | | | disease | Uni-ZAP XR |
| | Hypothalamus, schizophrenia, | Hypothalamus, | | | | |
| | re-excision | Schizophrenia | | | | |
| S0390 | Smooth muscle, control, | Smooth muscle | Pulmanary | Cell Line | | Uni-ZAP XR |
| | re-excision | | artery | | | |
| S0392 | Salivary Gland | Salivary gland; | | | | pSport1 |
| | | normal | | | | |
| S0400 | Brain, normal | Brain, normal | | | | pSport1 |
| S0402 | Adrenal Gland, normal | Adrenal gland; | | | | pSport1 |
| | | normal | | | | |
| S0404 | Rectum normal | Rectum, normal | | | | pSport1 |
| S0406 | Rectum tumour | Rectum tumour | | | | pSport1 |
| S0408 | Colon, normal | Colon, normal | | | | pSport1 |
| S0410 | Colon, tumour | Colon, tumour | | | | pSport1 |
| S0414 | Hippocampus, Alzheimer | Hippocampus, | | | | Other |
| | Subtracted | Alzheimer | | | | |
| | | Subtracted | | | | |
| S0418 | CHME Cell Line, treated 5 | CHME Cell Line; | | | | pCMVSport 3.0 |
| | hrs | treated | | | | |
| S0420 | CHME Cell | CHME Cell line, | | | | pSport1 |
| | Line, untreated | untreatetd | | | | |
| S0422 | Mo7e Cell Line GM-CSF | Mo7e Cell Line | | | | pCMVSport 3.0 |
| | treated (1 ng/ml) | GM-CSF treated | | | | |
| | | (1 ng/ml) | | | | |
| S0424 | TF-1 Cell Line GM-CSF | TF-1 Cell Line | | | | pSport1 |
| | Treated | GM-CSF Treated | | | | |
| S0426 | Monocyte activated, re- | Monocyte-activated | blood | Cell Line | | Uni-Zap XR |
| | excision | | | | | |
| S0428 | Neutrophils control; re- | human neutrophils | blood | Cell Line | | Uni-ZAP XR |
| | excision | | | | | |
| S0432 | Sinus piniformis Tumour | Sinus piniformis | | | | pSport1 |
| | | Tumour | | | | |
| S0434 | Stomach Normal | Stomach Normal | | | disease | pSport1 |
| S0436 | Stomach Tumour | Stomach Tumour | | | disease | pSport1 |
| S0438 | Liver Normal Met5No | Liver Normal | | | | pSport1 |
| | | Met5No | | | | |
| S0440 | Liver Tumour Met 5 Tu | Liver Tumour | | | | pSport1 |
| S0442 | Colon Normal | Colon Normal | | | | pSport1 |
| S0444 | Colon Tumor | Colon Tumour | | | disease | pSport1 |
| S0446 | Tongue Tumour | Tongue Tumour | | | | pSport1 |
| S0452 | Thymus | Thymus | | | | pSport1 |
| S0456 | Tongue Normal | Tongue Normal | | | | pSport1 |
| S0458 | Thyroid Normal (SDCA2 | Thyroid normal | | | | pSport1 |
| | No) | | | | | |
| S0460 | Thyroid Tumour | Thyroid Tumour | | | | pSport1 |
| S0462 | Thyroid Thyroiditis | Thyroid Thyroiditis | | | | pSport1 |
| S0466 | Larynx Tumor | Larynx Tumor | | | disease | pSport1 |
| S0468 | Ea.hy 926 cell line | Ea.hy.926 cell line | | | | pSport1 |
| S0470 | Adenocarcinoma | PYFD | | | disease | pSport1 |
| S0474 | Human blood platelets | Platelets | Blood | | | Other |
| | | | platelets | | | |
| S0665 | Human Amygdala, re- | Amygdala | | | | Uni-ZAP XR |
| | excission | | | | | |
| S3012 | Smooth Muscle Serum | Smooth muscle | Pulmanary | Cell Line | | pBluescript |
| | Treated, Norm | | artery | | | |
| S3014 | Smooth muscle, serum | Smooth muscle | Pulmanary | Cell Line | | pBluescript |
| | induced, re-exc | | artery | | | |
| S6016 | H. Frontal Cortex, | H. Brain, Frontal | Brain | | disease | Uni-ZAP XR |
| | Epileptic | Cortex, Epileptic | | | | |
| S6024 | Alzheimers, spongy | Alzheimer”s/Spongy | Brain | | disease | Uni-ZAP XR |
| | change | change | | | | |
| S6026 | Frontal Lobe, Dementia | Frontal Lobe | Brain | | | Uni-ZAP XR |
| | | dementia/Alzheimer”s | | | | |
| S6028 | Human Manic Depression | Human Manic | Brain | | disease | Uni-ZAP XR |
| | Tissue | depression tissue | | | | |
| T0002 | Activated T-cells | Activated T-Cell, | Blood | Cell Line | | pBluescript SK- |
| | | PBL fraction | | | | |
| T0003 | Human Fetal Lung | Human Fetal Lung | | | | pBluescript SK- |
| T0004 | Human White Fat | Human White Fat | | | | pBluescript SK- |
| T0006 | Human Pineal Gland | Human Pinneal | | | | pBluescript SK- |
| | | Gland | | | | |
| T0008 | Colorectal Tumor | Colorectal Tumor | | | disease | pBluescript SK |
| T0010 | Human Infant Brain | Human Infant Brain | | | | Other |
| T0023 | Human Pancreatic | Human Pancreatic | | | disease | pBluescript SK- |
| | Carcinoma | Carcinoma | | | | |
| T0040 | HSC172 cells | SA172 Cells | | | | pBluescript SK- |
| T0041 | Jurkat T-cell G1 phase | Jurkat T-cell | | | | pBluescript SK- |
| T0042 | Jurkat T Cell, S phase | Jurkat T-Cell Line | | | | pBluescript SK- |
| T0048 | Human Aortic | Human Aortic | | | | pBluescript SK- |
| | Endothelium | Endothilium | | | | |
| T0049 | Aorta endothelial cells + | Aorta endothelial | | | | pBluescript SK- |
| | TNF-a | cells | | | | |
| T0060 | Human White Adipose | Human White Fat | | | | pBluescript SK- |
| T0067 | Human Thyroid | Human Thyroid | | | | pBluescript SK- |
| T0068 | Normal Ovary, | Normal Ovary, | | | | pBluescript SK- |
| | Premenopausal | Premenopausal | | | | |
| T0069 | Human Uterus, normal | Human Uterus, | | | | pBluescript SK- |
| | | normal | | | | |
| T0071 | Human Bone Marrow | Human Bone | | | | pBluescript SK- |
| | | Marrow | | | | |
| T0082 | Human Adult Retina | Human Adult Retina | | | | pBluescript SK- |
| T0109 | Human (HCC) cell line | | | | | pBluescript SK- |
| | liver (mouse) metastasis, | | | | | |
| | remake | | | | | |
| T0110 | Human colon carcinoma | | | | | pBluescript SK- |
| | (HCC) cell line, remake | | | | | |
| T0114 | Human (Caco-2) cell line, | | | | | pBluescript SK- |
| | adenocarcinoma, colon, | | | | | |
| | remake | | | | | |
| L0002 | Atrium cDNA library | | | | | |
| | Human heart | | | | | |
| L0004 | ClonTech HL 1065a | | | | | |
| L0005 | Clontech human aorta | | | | | |
| | polyA+ mRNA (#6572) | | | | | |
| L0021 | Human adult (K. Okubo) | | | | | |
| L0022 | Human adult lung 3″ | | | | | |
| | directed MboI cDNA | | | | | |
| L0040 | Human colon mucosa | | | | | |
| L0055 | Human promyelocyte | | | | | |
| L0065 | Liver HepG2 cell line | | | | | |
| L0105 | Human aorta polyA+ | aorta | | | | |
| | (T Fujiwara) | | | | | |
| L0109 | Human brain cDNA | brain | | | | |
| L0142 | Human placenta cDNA | placenta | | | | |
| | (T Fujiwara) | | | | | |
| L0157 | Human fetal brain | | brain | | | |
| | (T Fujiwara) | | | | | |
| L0163 | Human heart cDNA | | heart | | | |
| | (Y Nakamura) | | | | | |
| L0194 | Human pancreatic cancer | pancreatic cancer | | Patu | | |
| | cell line Patu 8988t | | | 8988t | | |
| L0351 | Infant brain, Bento Soares | | | | | BA, M13- |
| | | | | | | derived |
| L0352 | Normalized infant brain, | | | | | BA, M13- |
| | Bento Soares | | | | | derived |
| L0361 | Stratagene ovary | | ovary | | | Bluescript SK- |
| | (#937217) | | | | | |
| L0362 | Stratagene ovarian cancer | | | | | Bluescript SK- |
| | (#937219) | | | | | |
| L0364 | NCI_CGAP_GC5 | germ cell tumor | | | | Bluescript SK- |
| L0366 | Stratagene schizo brain | schizophrenic brain | | | | Bluescript SK- |
| | S11 | S-11 frontal lobe | | | | |
| L0369 | NCI_CGAP_AA1 | adrenal adenoma | adrenal gland | | | Bluescript SK- |
| L0370 | Johnston frontal cortex | pooled frontal lobe | brain | | | Bluescript SK- |
| L0371 | NCI_CGAP_Br3 | breast tumor | breast | | | Bluescript SK- |
| L0372 | NCI_CGAP_Co12 | colon tumor | colon | | | Bluescript SK- |
| L0373 | NCI_CGAP_Co11 | tumor | colon | | | Bluescript SK- |
| L0374 | NCI_CGAP_Co2 | tumor | colon | | | Bluescript SK- |
| L0375 | NCI_CGAP_Kid6 | kidney tumor | kidney | | | Bluescript SK- |
| L0376 | NCI_CGAP_Lar1 | larynx | larynx | | | Bluescript SK- |
| L0378 | NCI_CGAP_Lu1 | lung tumor | lung | | | Bluescript SK- |
| L0381 | NCI_CGAP_HN4 | squamous cell | pharynx | | | Bluescript SK- |
| | | carcinoma | | | | |
| L0382 | NCI_CGAP_Pr25 | epithelium (cell line) | prostate | | | Bluescript SK- |
| L0383 | NCI_CGAP_Pr24 | invasive tumor (cell | prostate | | | Bluescript SK- |
| | | line) | | | | |
| L0384 | NCI_CGAP_Pr23 | prostate tumor | prostate | | | Bluescript SK- |
| L0385 | NCI_CGAP_Gas1 | gastric tumor | stomach | | | Bluescript SK- |
| L0386 | NCI_CGAP_HN3 | squamous cell | tongue | | | Bluescript SK- |
| | | carcinoma from base | | | | |
| | | of tongue | | | | |
| L0387 | NCI_CGAP_GCB0 | germinal center B- | tonsil | | | Bluescript SK- |
| | | cells | | | | |
| L0393 | B, Human Liver tissue | | | | | gt11 |
| L0415 | b4HB3MA Cot8-HAP-Ft | | | | | Lafmid BA |
| L0438 | normalized infant brain | total brain | brain | | | lafmid BA |
| | cDNA | | | | | |
| L0439 | Soares infant brain 1NIB | | whole brain | | | Lafmid BA |
| L0455 | Human retina cDNA | retina | eye | | | lambda gt10 |
| | randomly primed | | | | | |
| | sublibrary | | | | | |
| L0462 | WATM1 | | | | | lambda gt11 |
| L0471 | Human fetal heart, | | | | | Lambda ZAP Express |
| | Lambda ZAP Express | | | | | |
| L0475 | KG 1-a Lambda Zap | | | KG1-a | | Lambda Zap |
| | Express cDNA library | | | | | Express |
| | | | | | | (Stratagene) |
| L0477 | HPLA CCLee | placenta | | | | Lambda ZAP II |
| L0480 | Stratagene cat#937212 | | | | | Lambda ZAP, |
| | (1992) | | | | | pBluescript SK(-) |
| L0483 | Human pancreatic islet | | | | | Lambda ZAP II |
| L0485 | STRATAGENE Human | skeletal muscle | leg muscle | | | Lambda ZAP II |
| | skeletal muscle cDNA | | | | | |
| | library, cat #936215 | | | | | |
| L0499 | NCI_CGAP_HSC2 | stem cell 34+/38+ | bone marrow | | | pAMP1 |
| L0512 | NCI_CGAP_Ov36 | borderline ovarian | ovary | | | pAMP1 |
| | | carcinoma | | | | |
| L0517 | NCI_CGAP_Pr1 | | | | | pAMP10 |
| L0518 | NCI_CGAP_Pr2 | | | | | pAMP10 |
| L0519 | NCI_CGAP_Pr3 | | | | | pAMP10 |
| L0520 | NCI_CGAP_Alv1 | alveolar | | | | pAMP10 |
| | | rhabdomyosarcoma | | | | |
| L0521 | NCI_CGAP_Ew1 | Ewing”s sarcoma | | | | pAMP10 |
| L0526 | NCI_CGAP_Pr12 | metastatic prostate | | | | pAMP10 |
| | | bone lesion | | | | |
| L0527 | NCI_CGAP_Ov2 | ovary | | | | pAMP10 |
| L0528 | NCI_CGAP_Pr5 | prostate | | | | pAMP10 |
| L0529 | NCI_CGAP_Pr6 | prostate | | | | pAMP10 |
| L0533 | NCI_CGAP_HSC1 | stem cells | bone marrow | | | pAMP10 |
| L0534 | Chromosome 7 Fetal | brain | brain | | | pAMP10 |
| | Brain cDNA Library | | | | | |
| L0535 | NCI_CGAP_Br5 | infiltrating ductal | breast | | | pAMP10 |
| | | carcinoma | | | | |
| L0540 | NCI_CGAP_Pr10 | invasive prostate | prostate | | | pAMP10 |
| | | tumor | | | | |
| L0542 | NCI_CGAP_Pr11 | normal prostatic | prostate | | | pAMP10 |
| | | epithelial cells | | | | |
| L0543 | NCI_CGAP_Pr9 | normal prostatic | prostate | | | pAMP10 |
| | | epithelial cells | | | | |
| L0545 | NCI_CGAP_Pr4.1 | prostatic | prostate | | | pAMP10 |
| | | intraepithelial | | | | |
| | | neoplasia - high | | | | |
| | | grade | | | | |
| L0546 | NCI_CGAP_Pr18 | stroma | prostate | | | pAMP10 |
| L0547 | NCI_CGAP_Pr16 | tumor | prostate | | | pAMP10 |
| L0549 | NCI_CGAP_HN10 | carcinoma in situ | | | | pAMP10 |
| | | from retromolar | | | | |
| | | trigone | | | | |
| L0551 | NCI_CGAP_HN7 | normal squamous | | | | pAMP10 |
| | | epithelium, floor of | | | | |
| | | mouth | | | | |
| L0558 | NCI_CGAP_Ov40 | endometrioid | ovary | | | pAMP10 |
| | | ovarian metastasis | | | | |
| L0564 | Jia bone marrow stroma | bone marrow stroma | | | | pBluescript |
| L0565 | Normal Human | Bone | Hip | | | pBluescript |
| | Trabecular Bone Cells | | | | | |
| L0581 | Stratagene liver (#937224) | | liver | | | pBluescript SK |
| L0586 | HTCDL1 | | | | | pBluescript |
| | | | | | | SK(-) |
| L0588 | Stratagene endothelial cell | | | | | pBluescript SK- |
| | 937223 | | | | | |
| L0590 | Stratagene fibroblast | | | | | pBluescript SK- |
| | (#937212) | | | | | |
| L0591 | Stratagene HeLa cell s3 | | | | | pBluescript SK- |
| | 937216 | | | | | |
| L0592 | Stratagene hNT neuron | | | | | pBluescript SK- |
| | (#937233) | | | | | |
| L0593 | Stratagene | | | | | pBluescript SK- |
| | neuroepithelium | | | | | |
| | (#937231) | | | | | |
| L0594 | Stratagene | | | | | pBluescript SK- |
| | neuroepithelium | | | | | |
| | NT2RAMI 937234 | | | | | |
| L0595 | Stratagene NT2 neuronal | neuroepithelial cells | brain | | | pBluescript SK- |
| | precursor 937230 | | | | | |
| L0596 | Stratagene colon | | colon | | | pBluescript SK- |
| | (#937204) | | | | | |
| L0597 | Stratagene corneal stroma | | cornea | | | pBluescript SK- |
| | (#937222) | | | | | |
| L0598 | Morton Fetal Cochlea | cochlea | ear | | | pBluescript SK- |
| L0599 | Stratagene lung (#937210) | | lung | | | pBluescript SK- |
| L0600 | Weizmann Olfactory | olfactory epithelium | nose | | | pBluescript SK- |
| | Epithelium | | | | | |
| L0601 | Stratagene pancreas | | pancreas | | | pBluescript SK- |
| | (#937208) | | | | | |
| L0602 | Pancreatic, Islet | pancreatic islet | pancreas | | | pBluescript SK- |
| L0603 | Stratagene placenta | | placenta | | | pBluescript SK- |
| | (#937225) | | | | | |
| L0604 | Stratagene muscle 937209 | muscle | skeletal | | | pBluescript SK- |
| | | | muscle | | | |
| L0605 | Stratagene fetal spleen | fetal spleen | spleen | | | pBluescript SK- |
| | (#937205) | | | | | |
| L0606 | NCI_CGAP_Lym5 | follicular lymphoma | lymph node | | | pBluescript SK- |
| L0607 | NCI_CGAP_Lym6 | mantle cell | lymph node | | | pBluescript SK- |
| | | lymphoma | | | | |
| L0608 | Stratagene lung carcinoma | lung carcinoma | lung | NCI H69 | | pBluescript SK- |
| | 937218 | | | | | |
| L0611 | Schiller meningioma | meningioma | brain | | | pBluescript SK- |
| | | | | | | (Stratagene) |
| L0617 | Chromosome 22 exon | | | | | pBluescriptII KS+ |
| L0619 | Chromosome 9 exon II | | | | | pBluescriptII KS+ |
| L0622 | HM1 | | | | | pcDNAII |
| | | | | | | (Invitrogen) |
| L0623 | HM3 | pectoral muscle | | | | pcDNAII |
| | | (after mastectomy) | | | | (Invitrogen) |
| L0627 | NCI_CGAP_Co1 | bulk tumor | colon | | | pCMV-SPORT2 |
| L0628 | NCI_CGAP_Ov1 | ovary bulk tumor | ovary | | | pCMV-SPORT2 |
| L0629 | NCI_CGAP_Mel3 | metastatic | bowel (skin | | | pCMV-SPORT4 |
| | | melanoma to bowel | primary) | | | |
| L0630 | NCI_CGAP_CNS1 | substantia nigra | brain | | | pCMV-SPORT4 |
| L0631 | NCI_CGAP_Br7 | | breast | | | pCMV-SPORT4 |
| L0635 | NCI_CGAP_PNS1 | dorsal root ganglion | peripheral | | | pCMV-SPORT4 |
| | | | nervous | | | |
| | | | system | | | |
| L0636 | NCI_CGAP_Pit1 | four pooled pituitary | brain | | | pCMV-SPORT6 |
| | | adenomas | | | | |
| L0637 | NCI_CGAP_Brn53 | three pooled | brain | | | pCMV-SPORT6 |
| | | meningiomas | | | | |
| L0638 | NCI_CGAP_Brn35 | tumor, 5 pooled (see | brain | | | pCMV-SPORT6 |
| | | description) | | | | |
| L0639 | NCI_CGAP_Brn52 | tumor, 5 pooled (see | brain | | | pCMV-SPORT6 |
| | | description) | | | | |
| L0640 | NCI_CGAP_Br18 | four pooled high- | breast | | | pCMV-SPORT6 |
| | | grade tumors | | | | |
| | | including two prima | | | | |
| L0641 | NCI_CGAP_Co17 | juvenile granulosa | colon | | | pCMV-SPORT6 |
| | | tumor | | | | |
| L0642 | NCI_CGAP_Co18 | moderately | colon | | | pCMV-SPORT6 |
| | | differentiated | | | | |
| | | adenocarcinoma | | | | |
| L0643 | NCI_CGAP_Co19 | moderately | colon | | | pCMV-SPORT6 |
| | | differentiated | | | | |
| | | adenocarcinoma | | | | |
| L0644 | NCI_CGAP_Co20 | moderately | colon | | | pCMV-SPORT6 |
| | | differentiated | | | | |
| | | adenocarcinoma | | | | |
| L0646 | NCI_CGAP_Co14 | moderately- | colon | | | pCMV-SPORT6 |
| | | differentiated | | | | |
| | | adenocarcinoma | | | | |
| L0647 | NCI_CGAP_Sar4 | five pooled | connective | | | pCMV-SPORT6 |
| | | sarcomas, including | tissue | | | |
| | | myxoid liposarcoma | | | | |
| L0648 | NCI_CGAP_Eso2 | squamous cell | esophagus | | | pCMV-SPORT6 |
| | | carcinoma | | | | |
| L0649 | NCI_CGAP_GU1 | 2 pooled high-grade | genitourinary | | | pCMV-SPORT6 |
| | | transitional cell | tract | | | |
| | | tumors | | | | |
| L0650 | NCI_CGAP_Kid13 | 2 pooled Wilms” | kidney | | | pCMV-SPORT6 |
| | | tumors, one primary | | | | |
| | | and one metast | | | | |
| L0651 | NCI_CGAP_Kid8 | renal cell tumor | kidney | | | pCMV-SPORT6 |
| L0652 | NCI_CGAP_Lu27 | four pooled poorly- | lung | | | pCMV-SPORT6 |
| | | differentiated | | | | |
| | | adenocarcinomas | | | | |
| L0653 | NCI_CGAP_Lu28 | two pooled | lung | | | pCMV-SPORT6 |
| | | squamous cell | | | | |
| | | carcinomas | | | | |
| L0654 | NCI_CGAP_Lu31 | | lung, cell line | | | pCMV-SPORT6 |
| L0655 | NCI_CGAP_Lym12 | lymphoma, | lymph node | | | pCMV-SPORT6 |
| | | follicular mixed | | | | |
| | | small and large cell | | | | |
| L0656 | NCI_CGAP_Ov38 | normal epithelium | ovary | | | pCMV-SPORT6 |
| L0657 | NCI_CGAP_Ov23 | tumor, 5 pooled (see | ovary | | | pCMV-SPORT6 |
| | | description) | | | | |
| L0658 | NCI_CGAP_Ov35 | tumor, 5 pooled (see | ovary | | | pCMV-SPORT6 |
| | | description) | | | | |
| L0659 | NCI_CGAP_Pan1 | adenocarcinoma | pancreas | | | pCMV-SPORT6 |
| L0661 | NCI_CGAP_Mel15 | malignant | skin | | | pCMV-SPORT6 |
| | | melanoma, | | | | |
| | | metastatic to lymph | | | | |
| | | node | | | | |
| L0662 | NCI_CGAP_Gas4 | poorly differentiated | stomach | | | pCMV-SPORT6 |
| | | Adenocarcinoma | | | | |
| | | with signet r | | | | |
| L0663 | NCI_CGAP_Ut2 | moderately- | uterus | | | pCMV-SPORT6 |
| | | differentiated | | | | |
| | | endometrial | | | | |
| | | adenocarcino | | | | |
| L0664 | NCI_CGAP_Ut3 | poorly-differentiated | uterus | | | pCMV-SPORT6 |
| | | endometrial | | | | |
| | | adenocarcinoma, | | | | |
| L0665 | NCI_CGAP_Ut4 | serous papillary | uterus | | | pCMV-SPORT6 |
| | | carcinoma, high | | | | |
| | | grade, 2 pooled t | | | | |
| L0666 | NCI_CGAP_Ut1 | well-differentiated | uterus | | | pCMV-SPORT6 |
| | | endometrial | | | | |
| | | adenocarcinoma, 7 | | | | |
| L0667 | NCI_CGAP_CML1 | myeloid cells, 18 | whole blood | | | pCMV SPORT6 |
| | | pooled CML cases, | | | | |
| | | BCR/ABL rearra | | | | |
| L0717 | Gessler Wilms tumor | | | | | pSPORT1 |
| L0718 | Testis 5 | | | | | pSPORT1 |
| L0720 | PN001-Normal Human | | prostate | | | pSport1 |
| | Prostate | | | | | |
| L0731 | Soares_pregnant_uterus_{—} | | uterus | | | pT7T3-Pac |
| | NbHPU | | | | | |
| L0738 | Human colorectal cancer | | | | | pT7T3D |
| L0740 | Soares melanocyte | melanocyte | | | | pT7T3D |
| | 2NbHM | | | | | (Pharmacia) |
| | | | | | | with a modified |
| | | | | | | polylinker |
| L0741 | Soares adult brain | | brain | | | pT7T3D |
| | N2b4HB55Y | | | | | (Pharmacia) |
| | | | | | | with a modified |
| | | | | | | polylinker |
| L0742 | Soares adult brain | | brain | | | pT7T3D |
| | N2b5HB55Y | | | | | (Pharmacia) |
| | | | | | | with a modified |
| | | | | | | polylinker |
| L0743 | Soares breast 2NbHBst | | breast | | | pT7T3D |
| | | | | | | (Pharmacia) |
| | | | | | | with a modified |
| | | | | | | polylinker |
| L0744 | Soares breast 3NbHBst | | breast | | | pT7T3D |
| | | | | | | (Pharmacia) |
| | | | | | | with a modified |
| | | | | | | polylinker |
| L0745 | Soares retina N2b4HR | retina | eye | | | pT7T3D |
| | | | | | | (Pharmacia) |
| | | | | | | with a modified |
| | | | | | | polylinker |
| L0746 | Soares retina N2b5HR | retina | eye | | | pT7T3D |
| | | | | | | (Pharmacia) |
| | | | | | | with a modified |
| | | | | | | polylinker |
| L0747 | Soares_fetal_heart_NbHH | | heart | | | pT7T3D |
| | 19W | | | | | (Pharmacia) |
| | | | | | | with a modified |
| | | | | | | polylinker |
| L0748 | Soares fetal liver spleen | | Liver and | | | pT7T3D |
| | 1NFLS | | Spleen | | | (Pharmacia) |
| | | | | | | with a modified |
| | | | | | | polylinker |
| L0749 | Soares_fetal_liver_{—} | | Liver and | | | pT7T3D |
| | spleen_1NFLS_S1 | | Spleen | | | (Pharmacia) |
| | | | | | | with a modified |
| | | | | | | polylinker |
| L0750 | Soares_fetal_lung_NbHL1 | | lung | | | pT7T3D |
| | 9W | | | | | (Pharmacia) |
| | | | | | | with a modified |
| | | | | | | polylinker |
| L0751 | Soares ovary tumor | ovarian tumor | ovary | | | pT7T3D |
| | NbHOT | | | | | (Pharmacia) |
| | | | | | | with a modified |
| | | | | | | polylinker |
| L0752 | Soares_parathyroid_{—} | parathyroid tumor | parathyroid | | | pT7T3D |
| | tumor_NbHPA | | gland | | | (Pharmacia) |
| | | | | | | with a modified |
| | | | | | | polylinker |
| L0753 | Soares_pineal_gland_N3H | | pineal gland | | | pT7T3D |
| | PG | | | | | (Pharmacia) |
| | | | | | | with a modified |
| | | | | | | polylinker |
| L0754 | Soares placenta Nb2HP | | placenta | | | pT7T3D |
| | | | | | | (Pharmacia) |
| | | | | | | with a modified |
| | | | | | | polylinker |
| L0755 | Soares_placenta_8to9wee | | placenta | | | pT7T3D |
| | ks_2NbHP8to9W | | | | | (Pharmacia) |
| | | | | | | with a modified |
| | | | | | | polylinker |
| L0756 | Soares_multiple_{—} | multiple sclerosis | | | | pT7T3D |
| | sclerosis_2NbHMSP | lesions | | | | (Pharmacia) |
| | | | | | | with a modified |
| | | | | | | polylinker |
| | | | | | | V_TYPE |
| L0757 | Soares_senescent_fibrobla | senescent fibroblast | | | | pT7T3D |
| | sts_NbHSF | | | | | (Pharmacia) |
| | | | | | | with a modified |
| | | | | | | polylinker |
| | | | | | | V_TYPE |
| L0758 | Soares_testis_NHT | | | | | pT7T3D-Pac |
| | | | | | | (Pharmacia) |
| | | | | | | with a modified |
| | | | | | | polylinker |
| L0759 | Soares_total_fetus_Nb2H | | | | | pT7T3D-Pac |
| | F8_9w | | | | | (Pharmacia) |
| | | | | | | with a modified |
| | | | | | | polylinker |
| L0761 | NCI_CGAP_CLL1 | B-cell, chronic | | | | pT7T3D-Pac |
| | | lymphotic leukemia | | | | (Pharmacia) |
| | | | | | | with a modified |
| | | | | | | polylinker |
| L0762 | NCI_CGAP_Br1.1 | breast | | | | pT7T3D-Pac |
| | | | | | | (Pharmacia) |
| | | | | | | with a modified |
| | | | | | | polylinker |
| L0763 | NCI_CGAP_Br2 | breast | | | | pT7T3D-Pac |
| | | | | | | (Pharmacia) |
| | | | | | | with a modified |
| | | | | | | polylinker |
| L0764 | NCI_CGAP_Co3 | colon | | | | pT7T3D-Pac |
| | | | | | | (Pharmacia) |
| | | | | | | with a modified |
| | | | | | | polylinker |
| L0765 | NCI_CGAP_Co4 | colon | | | | pT7T3D-Pac |
| | | | | | | (Pharmacia) |
| | | | | | | with a modified |
| | | | | | | polylinker |
| L0766 | NCI_CGAP_GCB1 | germinal center B | | | | pT7T3D-Pac |
| | | cell | | | | (Pharmacia) |
| | | | | | | with a modified |
| | | | | | | polylinker |
| L0767 | NCI_CGAP_GC3 | pooled germ cell | | | | pT7T3D-Pac |
| | | tumors | | | | (Pharmacia) |
| | | | | | | with a modified |
| | | | | | | polylinker |
| L0768 | NCI_CGAP_GC4 | pooled germ cell | | | | pT7T3D-Pac |
| | | tumors | | | | (Pharmacia) |
| | | | | | | with a modified |
| | | | | | | polylinker |
| L0769 | NCI_CGAP_Brn25 | anaplastic | brain | | | pT7T3D-Pac |
| | | oligodendroglioma | | | | (Pharmacia) |
| | | | | | | with a modified |
| | | | | | | polylinker |
| L0770 | NCI_CGAP_Brn23 | glioblastoma | brain | | | pT7T3D-Pac |
| | | (pooled) | | | | (Pharmacia) |
| | | | | | | with a modified |
| | | | | | | polylinker |
| L0771 | NCI_CGAP_Co8 | adenocarcinoma | colon | | | pT7T3D-Pac |
| | | | | | | (Pharmacia) |
| | | | | | | with a modified |
| | | | | | | polylinker |
| L0772 | NCI_CGAP_Co10 | colon tumor RER+ | colon | | | pT7T3D-Pac |
| | | | | | | (Pharmacia) |
| | | | | | | with a modified |
| | | | | | | polylinker |
| L0773 | NCI_CGAP_Co9 | colon tumor RER+ | colon | | | pT7T3D-Pac |
| | | | | | | (Pharmacia) |
| | | | | | | with a modified |
| | | | | | | polylinker |
| L0774 | NCI_CGAP_Kid3 | | kidney | | | pT7T3D-Pac |
| | | | | | | (Pharmacia) |
| | | | | | | with a modified |
| | | | | | | polylinker |
| L0775 | NCI_CGAP_Kid5 | 2 pooled tumors | kidney | | | pT7T3D-Pac |
| | | (clear cell type) | | | | (Pharmacia) |
| | | | | | | with a modified |
| | | | | | | polylinker |
| L0776 | NCI_CGAP_Lu5 | carcinoid | lung | | | pT7T3D-Pac |
| | | | | | | (Pharmacia) |
| | | | | | | with a modified |
| | | | | | | polylinker |
| L0777 | Soares_NhHMPu_S1 | Pooled human | mixed (see | | | pT7T3D-Pac |
| | | melanocyte, fetal | below) | | | (Pharmacia) |
| | | heart, and pregnant | | | | with a modified |
| | | | | | | polylinker |
| L0778 | Barstead pancreas | | pancreas | | | pT7T3D-Pac |
| | HPLRB1 | | | | | (Pharmacia) |
| | | | | | | with a modified |
| | | | | | | polylinker |
| L0779 | Soares_NFL_T_GBC_S1 | | pooled | | | pT7T3D-Pac |
| | | | | | | (Pharmacia) |
| | | | | | | with a modified |
| | | | | | | polylinker |
| L0780 | Soares_NSF_F8_9W_{—} | | pooled | | | pT7T3D-Pac |
| | OT_PA_P_S1 | | | | | (Pharmacia) |
| | | | | | | with a modified |
| | | | | | | polylinker |
| L0782 | NCI_CGAP_Pr21 | normal prostate | prostate | | | pT7T3D-Pac |
| | | | | | | (Pharmacia) |
| | | | | | | with a modified |
| | | | | | | polylinker |
| L0783 | NCI_CGAP_Pr22 | normal prostate | prostate | | | pT7T3D-Pac |
| | | | | | | (Pharmacia) |
| | | | | | | with a modified |
| | | | | | | polylinker |
| L0785 | Barstead spleen HPLRB2 | | spleen | | | pT7T3D-Pac |
| | | | | | | (Pharmacia) |
| | | | | | | with a modified |
| | | | | | | polylinker |
| L0786 | Soares_NbHFB | | whole brain | | | pT7T3D-Pac |
| | | | | | | (Pharmacia) |
| | | | | | | with a modified |
| | | | | | | polylinker |
| L0787 | NCI_CGAP_Sub1 | | | | | pT7T3D-Pac |
| | | | | | | (Pharmacia) |
| | | | | | | with a modified |
| | | | | | | polylinker |
| L0788 | NCI_CGAP_Sub2 | | | | | pT7T3D-Pac |
| | | | | | | (Pharmacia) |
| | | | | | | with a modified |
| | | | | | | polylinker |
| L0789 | NCI_CGAP_Sub3 | | | | | pT7T3D-Pac |
| | | | | | | (Pharmacia) |
| | | | | | | with a modified |
| | | | | | | polylinker |
| L0790 | NCI_CGAP_Sub4 | | | | | pT7T3D-Pac |
| | | | | | | (Pharmacia) |
| | | | | | | with a modified |
| | | | | | | polylinker |
| L0791 | NCI_CGAP_Sub5 | | | | | pT7T3D-Pac |
| | | | | | | (Pharmacia) |
| | | | | | | with a modified |
| | | | | | | polylinker |
| L0792 | NCI_CGAP_Sub6 | | | | | pT7T3D-Pac |
| | | | | | | (Pharmacia) |
| | | | | | | with a modified |
| | | | | | | polylinker |
| L0793 | NCI_CGAP_Sub7 | | | | | pT7T3D-Pac |
| | | | | | | (Pharmacia) |
| | | | | | | with a modified |
| | | | | | | polylinker |
| L0794 | NCI_CGAP_GC6 | pooled germ cell | | | | pT7T3D-Pac |
| | | tumors | | | | (Pharmacia) |
| | | | | | | with a modified |
| | | | | | | polylinker |
| L0796 | NCI_CGAP_Brn50 | medulloblastoma | brain | | | pT7T3D-Pac |
| | | | | | | (Pharmacia) |
| | | | | | | with a modified |
| | | | | | | polylinker |
| L0800 | NCI_CGAP_Co16 | colon tumor, RER+ | colon | | | pT7T3D-Pac |
| | | | | | | (Pharmacia) |
| | | | | | | with a modified |
| | | | | | | polylinker |
| L0803 | NCI_CGAP_Kid11 | | kidney | | | pT7T3D-Pac |
| | | | | | | (Pharmacia) |
| | | | | | | with a modified |
| | | | | | | polylinker |
| L0804 | NCI_CGAP_Kid12 | 2 pooled tumors | kidney | | | pT7T3D-Pac |
| | | (clear cell type) | | | | (Pharmacia) |
| | | | | | | with a modified |
| | | | | | | polylinker |
| L0805 | NCI_CGAP_Lu24 | carcinoid | lung | | | pT7T3D-Pac |
| | | | | | | (Pharmacia) |
| | | | | | | with a modified |
| | | | | | | polylinker |
| L0806 | NCI_CGAP_Lu19 | squamous cell | lung | | | pT7T3D-Pac |
| | | carcinoma, poorly | | | | (Pharmacia) |
| | | differentiated (4 | | | | with a modified |
| | | | | | | polylinker |
| L0807 | NCI_CGAP_Ov18 | fibrotheoma | ovary | | | pT7T3D-Pac |
| | | | | | | (Pharmacia) |
| | | | | | | with a modified |
| | | | | | | polylinker |
| L0808 | Barstead prostate BPH | | prostate | | | pT7T3D-Pac |
| | HPLRB4.1 | | | | | (Pharmacia) |
| | | | | | | with a modified |
| | | | | | | polylinker |
| L0809 | NCI_CGAP_Pr28 | | prostate | | | pT7T3D-Pac |
| | | | | | | (Pharmacia) |
| | | | | | | with a modified |
| | | | | | | polylinker |
| L2251 | Human fetal lung | Fetal lung | | | | |

[0090] TABLE 5

| OMIM | |
|---|---|
| Reference | Description |
| 106300 | Ankylosing spondylitis |
| 108800 | Atrial septal defect, secundum type |
| 120160 | Osteogenesis imperfecta, 4 clinical forms, |
| | 166200, 166210, 259420, 166220 |
| 120160 | Osteoporosis, idiopathic, 166710 |
| 120160 | Ehlers-Danlos syndrome, type VIIA2, |
| | 130060 |
| 120160 | Marfan syndrome, atypical |
| 120290 | OSMED syndrome, 215150 |
| 120290 | Stickler syndrome, type II, 184840 |
| 120810 | C4 deficiency |
| 120820 | C4 deficiency |
| 126650 | Chloride diarrhea, congenital, Finnish type, |
| | 214700 |
| 126650 | Colon cancer |
| 129900 | EEC syndrome-1 |
| 142857 | Pemphigoid, susceptibility to |
| 142858 | Beryllium disease, chronic, susceptibility to |
| 145001 | Hyperparathyroidism-jaw tumor syndrome |
| 150270 | Laryngeal adductor paralysis |
| 150292 | Epidermolysis bullosa, Herlitz junctional |
| | type, 226700 |
| 154276 | Malignant hyperthermia susceptibility 3 |
| 154705 | Marfan syndrome, type II |
| 167250 | Paget disease of bone |
| 170261 | Bare lymphocyte syndrome, type I, due to TAP2 |
| | deficiency |
| 173360 | Thrombophilia due to excessive plasminogen |
| | activator inhibitor |
| 173360 | Hemorrhagic diathesis due to PAI1 deficiency |
| 177900 | Psoriasis susceptibility-1 |
| 179450 | Ragweed sensitivity |
| 183600 | Split hand/foot malformation, type 1 |
| 187680 | 6-mercaptopurine sensitivity |
| 193300 | Renal cell carcinoma |
| 193300 | von Hippel-Lindau syndrome |
| 201910 | Adrenal hyperplasia, congenital, due to |
| | 21-hydroxylase deficiency |
| 208250 | Jacobs syndrome |
| 217000 | C2 deficiency |
| 222100 | Diabetes mellitus, insulin-dependent-1 |
| 227646 | Fanconi anemia, type D |
| 233100 | [Renal glucosuria] |
| 235200 | Hemochromatosis |
| 248611 | Maple syrup urine disease, type Ib |
| 253260 | Biotinidase deficiency |
| 256550 | Sialidosis, type I |
| 256550 | Sialidosis, type II |
| 278720 | Xeroderma pigmentosum, group C |
| 600202 | Dyslexia, specific, 2 |
| 600261 | Ehlers-Danlos-like syndrome |
| 600995 | Nephrotic syndrome, idiopathic, |
| | steroid-resistant |
| 601154 | Cardiomyopathy, dilated, 1E |
| 601253 | Muscular dystrophy, limb-girdle, type IC |
| 601652 | Glaucoma 1A, primary open angle, |
| | juvenile-onset, 137750 |
| 601868 | Deafness, autosomal dominant 13 |
| 602011 | Pancreatic endocrine tumors |
| 602136 | Refsum disease, infantile, 266510 |
| 602136 | Zellweger syndrome-1, 214100 |
| 602136 | Adrenoleukodystrophy, neonatal, 202370 |
| 602280 | Retinitis pigmentosa-14, 600132 |
| 602447 | Coronary artery disease, susceptibility to |
| 602475 | Ossification of posterior longitudinal |
| | ligament of spine |

[0091] Polynucleotide and Polypeptide Variants

[0092] The present invention is directed to variants of the polynucleotide sequence disclosed in SEQ ID NO:X or the complementary strand thereto, nucleotide sequences encoding the polypeptide of SEQ ID NO:Y, the nucleotide sequence of SEQ ID NO:X encoding the polypeptide sequence as defined in column 7 of Table 1A, nucleotide sequences encoding the polypeptide as defined in column 7 of Table 1A, the nucleotide sequence as defined in columns 8 and 9 of Table 2, nucleotide sequences encoding the polypeptide encoded by the nucleotide sequence as defined in columns 8 and 9 of Table 2, the nucleotide sequence as defined in column 6 of Table 1B, nucleotide sequences encoding the polypeptide encoded by the nucleotide sequence as defined in column 6 of Table 1B, the cDNA sequence contained in Clone ID NO:Z, and/or nucleotide sequences encoding the polypeptide encoded by the cDNA sequence contained in Clone ID NO:Z.

[0093] The present invention also encompasses variants of the polypeptide sequence disclosed in SEQ ID NO:Y, the polypeptide sequence as defined in column 7 of Table 1A, a polypeptide sequence encoded by the polynucleotide sequence in SEQ ID NO:X, a polypeptide sequence encoded by the nucleotide sequence as defined in columns 8 and 9 of Table 2, a polypeptide sequence encoded by the nucleotide sequence as defined in column 6 of Table 1B, a polypeptide sequence encoded by the complement of the polynucleotide sequence in SEQ ID NO:X, and/or a polypeptide sequence encoded by the cDNA sequence contained in Clone ID NO:Z.

[0094] “Variant” refers to a polynucleotide or polypeptide differing from the polynucleotide or polypeptide of the present invention, but retaining essential properties thereof. Generally, variants are overall closely similar, and, in many regions, identical to the polynucleotide or polypeptide of the present invention.

[0095] Thus, one aspect of the invention provides an isolated nucleic acid molecule comprising, or alternatively consisting of, a polynucleotide having a nucleotide sequence selected from the group consisting of: (a) a nucleotide sequence described in SEQ ID NO:X or contained in the cDNA sequence of Clone ID NO:Z; (b) a nucleotide sequence in SEQ ID NO:X or the cDNA in Clone ID NO:Z which encodes the complete amino acid sequence of SEQ ID NO:Y or the complete amino acid sequence encoded by the cDNA in Clone ID NO:Z; (c) a nucleotide sequence in SEQ ID NO:X or the cDNA in Clone ID NO:Z which encodes a mature polypeptide; (d) a nucleotide sequence in SEQ ID NO:X or the cDNA sequence of Clone ID NO:Z, which encodes a biologically active fragment of a polypeptide; (e) a nucleotide sequence in SEQ ID NO:X or the cDNA sequence of Clone ID NO:Z, which encodes an antigenic fragment of a polypeptide; (f) a nucleotide sequence encoding a polypeptide comprising the complete amino acid sequence of SEQ ID NO:Y or the complete amino acid sequence encoded by the cDNA in Clone ID NO:Z; (g) a nucleotide sequence encoding a mature polypeptide of the amino acid sequence of SEQ ID NO:Y or the amino acid sequence encoded by the cDNA in Clone ID NO:Z; (h) a nucleotide sequence encoding a biologically active fragment of a polypeptide having the complete amino acid sequence of SEQ ID NO:Y or the complete amino acid sequence encoded by the cDNA in Clone ID NO:Z; (i) a nucleotide sequence encoding an antigenic fragment of a polypeptide having the complete amino acid sequence of SEQ ID NO:Y or the complete amino acid sequence encoded by the cDNA in Clone ID NO:Z; and (j) a nucleotide sequence complementary to any of the nucleotide sequences in (a), (b), (c), (d), (e), (f), (g), (h), or (i) above.

[0096] The present invention is also directed to nucleic acid molecules which comprise, or alternatively consist of, a nucleotide sequence which is at least 80%, 85%, 90%, 95%, 96%, 97%, 98%, 99% or 100%, identical to, for example, any of the nucleotide sequences in (a), (b), (c), (d), (e), (f), (g), (h), (i), or (j) above, the nucleotide coding sequence in SEQ ID NO:X or the complementary strand thereto, the nucleotide coding sequence of the cDNA contained in Clone ID NO:Z or the complementary strand thereto, a nucleotide sequence encoding the polypeptide of SEQ ID NO:Y, a nucleotide sequence encoding a polypeptide sequence encoded by the nucleotide sequence in SEQ ID NO:X, a polypeptide sequence encoded by the complement of the polynucleotide sequence in SEQ ID NO:X, a nucleotide sequence encoding the polypeptide encoded by the cDNA contained in Clone ID NO:Z, the nucleotide coding sequence in SEQ ID NO:X as defined in columns 8 and 9 of Table 2 or the complementary strand thereto, a nucleotide sequence encoding the polypeptide encoded by the nucleotide sequence in SEQ ID NO:X as defined in columns 8 and 9 of Table 2 or the complementary strand thereto, the nucleotide coding sequence in SEQ ID NO:B as defined in column 6 of Table 1B or the complementary strand thereto, a nucleotide sequence encoding the polypeptide encoded by the nucleotide sequence in SEQ ID NO:B as defined in column 6 of Table 1B or the complementary strand thereto, the nucleotide sequence in SEQ ID NO:X encoding the polypeptide sequence as defined in column 7 of Table 1A or the complementary strand thereto, nucleotide sequences encoding the polypeptide as defined in column 7 of Table 1A or the complementary strand thereto, and/or polynucleotide fragments of any of these nucleic acid molecules (e.g., those fragments described herein). Polynucleotides which hybridize to the complement of these nucleic acid molecules under stringent hybridization conditions or alternatively, under lower stringency conditions, are also encompassed by the invention, as are polypeptides encoded by these polynucleotides and nucleic acids.

[0097] In a preferred embodiment, the invention encompasses nucleic acid molecules which comprise, or alternatively, consist of a polynucleotide which hybridizes under stringent hybridization conditions, or alternatively, under lower stringency conditions, to a polynucleotide in (a), (b), (c), (d), (e), (f), (g), (h), or (i), above, as are polypeptides encoded by these polynucleotides. In another preferred embodiment, polynucleotides which hybridize to the complement of these nucleic acid molecules under stringent hybridization conditions, or alternatively, under lower stringency conditions, are also encompassed by the invention, as are polypeptides encoded by these polynucleotides.

[0098] In another embodiment, the invention provides a purified protein comprising, or alternatively consisting of, a polypeptide having an amino acid sequence selected from the group consisting of: (a) the complete amino acid sequence of SEQ ID NO:Y or the complete amino acid sequence encoded by the cDNA in Clone ID NO:Z; (b) the amino acid sequence of a mature form of a polypeptide having the amino acid sequence of SEQ ID NO:Y or the amino acid sequence encoded by the cDNA in Clone ID NO:Z; (c) the amino acid sequence of a biologically active fragment of a polypeptide having the complete amino acid sequence of SEQ ID NO:Y or the complete amino acid sequence encoded by the cDNA in Clone ID NO:Z; and (d) the amino acid sequence of an antigenic fragment of a polypeptide having the complete amino acid sequence of SEQ ID NO:Y or the complete amino acid sequence encoded by the cDNA in Clone ID NO:Z.

[0099] The present invention is also directed to proteins which comprise, or alternatively consist of, an amino acid sequence which is at least 80%, 85%, 90%, 95%, 96%, 97%, 98%, 99% or 100%, identical to, for example, any of the amino acid sequences in (a), (b), (c), or (d), above, the amino acid sequence shown in SEQ ID NO:Y, the amino acid sequence encoded by the cDNA contained in Clone ID NO:Z, the amino acid sequence of the polypeptide encoded by the nucleotide sequence in SEQ ID NO:X as defined in columns 8 and 9 of Table 2, the amino acid sequence of the polypeptide encoded by the nucleotide sequence in SEQ ID NO:B as defined in column 6 of Table 1B, the amino acid sequence as defined in column 7 of Table 1A, an amino acid sequence encoded by the nucleotide sequence in SEQ ID NO:X, and an amino acid sequence encoded by the complement of the polynucleotide sequence in SEQ ID NO:X. Fragments of these polypeptides are also provided (e.g., those fragments described herein). Further proteins encoded by polynucleotides which hybridize to the complement of the nucleic acid molecules encoding these amino acid sequences under stringent hybridization conditions or alternatively, under lower stringency conditions, are also encompassed by the invention, as are the polynucleotides encoding these proteins.

[0100] By a nucleic acid having a nucleotide sequence at least, for example, 95% “identical” to a reference nucleotide sequence of the present invention, it is intended that the nucleotide sequence of the nucleic acid is identical to the reference sequence except that the nucleotide sequence may include up to five point mutations per each 100 nucleotides of the reference nucleotide sequence encoding the polypeptide. In other words, to obtain a nucleic acid having a nucleotide sequence at least 95% identical to a reference nucleotide sequence, up to 5% of the nucleotides in the reference sequence may be deleted or substituted with another nucleotide, or a number of nucleotides up to 5% of the total nucleotides in the reference sequence may be inserted into the reference sequence. The query sequence may be an entire sequence referred to in Table 1A or 2 as the ORF (open reading frame), or any fragment specified as described herein.

[0101] As a practical matter, whether any particular nucleic acid molecule or polypeptide is at least 80%, 85%, 90%, 95%, 96%, 97%, 98% or 99% identical to a nucleotide sequence of the present invention can be determined conventionally using known computer programs. A preferred method for determining the best overall match between a query sequence (a sequence of the present invention) and a subject sequence, also referred to as a global sequence alignment, can be determined using the FASTDB computer program based on the algorithm of Brutlag et al. (Comp. App. Biosci. 6:237-245 (1990)). In a sequence alignment the query and subject sequences are both DNA sequences. An RNA sequence can be compared by converting U's to T's. The result of said global sequence alignment is expressed as percent identity. Preferred parameters used in a FASTDB alignment of DNA sequences to calculate percent identity are: Matrix=Unitary, k-tuple=4, Mismatch Penalty=1, Joining Penalty=30, Randomization Group Length=0, Cutoff Score=1, Gap Penalty=5, Gap Size Penalty 0.05, Window Size=500 or the length of the subject nucleotide sequence, whichever is shorter.

[0102] If the subject sequence is shorter than the query sequence because of 5′ or 3′ deletions, not because of internal deletions, a manual correction must be made to the results. This is because the FASTDB program does not account for 5′ and 3′ truncations of the subject sequence when calculating percent identity. For subject sequences truncated at the 5′ or 3′ ends, relative to the query sequence, the percent identity is corrected by calculating the number of bases of the query sequence that are 5′ and 3′ of the subject sequence, which are not matched/aligned, as a percent of the total bases of the query sequence. Whether a nucleotide is matched/aligned is determined by results of the FASTDB sequence alignment. This percentage is then subtracted from the percent identity, calculated by the above FASTDB program using the specified parameters, to arrive at a final percent identity score. This corrected score is what is used for the purposes of the present invention. Only bases outside the 5′ and 3′ bases of the subject sequence, as displayed by the FASTDB alignment, which are not matched/aligned with the query sequence, are calculated for the purposes of manually adjusting the percent identity score.

[0103] For example, a 90 base subject sequence is aligned to a 100 base query sequence to determine percent identity. The deletions occur at the 5′ end of the subject sequence and therefore, the FASTDB alignment does not show a matched/alignment of the first 10 bases at 5′ end. The 10 unpaired bases represent 10% of the sequence (number of bases at the 5′ and 3′ ends not matched/total number of bases in the query sequence) so 10% is subtracted from the percent identity score calculated by the FASTDB program. If the remaining 90 bases were perfectly matched the final percent identity would be 90%. In another example, a 90 base subject sequence is compared with a 100 base query sequence. This time the deletions are internal deletions so that there are no bases on the 5′ or 3′ of the subject sequence which are not matched/aligned with the query. In this case the percent identity calculated by FASTDB is not manually corrected. Once again, only bases 5′ and 3′ of the subject sequence which are not matched/aligned with the query sequence are manually corrected for. No other manual corrections are to be made for the purposes of the present invention.

[0104] By a polypeptide having an amino acid sequence at least, for example, 95% “identical” to a query amino acid sequence of the present invention, it is intended that the amino acid sequence of the subject polypeptide is identical to the query sequence except that the subject polypeptide sequence may include up to five amino acid alterations per each 100 amino acids of the query amino acid sequence. In other words, to obtain a polypeptide having an amino acid sequence at least 95% identical to a query amino acid sequence, up to 0.5% of the amino acid residues in the subject sequence may be inserted, deleted, (indels) or substituted with another amino acid. These alterations of the reference sequence may occur at the amino or carboxy terminal positions of the reference amino acid sequence or anywhere between those terminal positions, interspersed either individually among residues in the reference sequence or in one or more contiguous groups within the reference sequence.

[0105] As a practical matter, whether any particular polypeptide is at least 80%, 85%, 90%, 95%, 96%, 97%, 98% or 99% identical to, for instance, the amino acid sequence of a polypeptide referred to in Table 1A (e.g., the amino acid sequence identified in column 6) or Table 2 (e.g., the amino acid sequence of the polypeptide encoded by the polynucleotide sequence defined in columns 8 and 9 of Table 2) or a fragment thereof, the amino acid sequence of the polypeptide encoded by the polynucleotide sequence in SEQ ID NO:B as defined in column 6 of Table 1B or a fragment thereof, the amino acid sequence of the polypeptide encoded by the nucleotide sequence in SEQ ID NO:X or a fragment thereof, or the amino acid sequence of the polypeptide encoded by cDNA contained in Clone ID NO:Z, or a fragment thereof, can be determined conventionally using known computer programs. A preferred method for determining the best overall match between a query sequence (a sequence of the present invention) and a subject sequence, also referred to as a global sequence alignment, can be determined using the FASTDB computer program based on the algorithm of Brutlag et al. (Comp. App. Biosci.6:237-245 (1990)). In a sequence alignment the query and subject sequences are either both nucleotide sequences or both amino acid sequences. The result of said global sequence alignment is expressed as percent identity. Preferred parameters used in a FASTDB amino acid alignment are: Matrix=PAM 0, k-tuple=2, Mismatch Penalty=1, Joining Penalty=20, Randomization Group Length=0, Cutoff Score=1, Window Size=sequence length, Gap Penalty=5, Gap Size Penalty=0.05, Window Size=500 or the length of the subject amino acid sequence, whichever is shorter.

[0106] If the subject sequence is shorter than the query sequence due to N- or C-terminal deletions, not because of internal deletions, a manual correction must be made to the results. This is because the FASTDB program does not account for N- and C-terminal truncations of the subject sequence when calculating global percent identity. For subject sequences truncated at the N- and C-termini, relative to the query sequence, the percent identity is corrected by calculating the number of residues of the query sequence that are N- and C-terminal of the subject sequence, which are not matched/aligned with a corresponding subject residue, as a percent of the total bases of the query sequence. Whether a residue is matched/aligned is determined by results of the FASTDB sequence alignment. This percentage is then subtracted from the percent identity, calculated by the above FASTDB program using the specified parameters, to arrive at a final percent identity score. This final percent identity score is what is used for the purposes of the present invention. Only residues to the N- and C-termini of the subject sequence, which are not matched/aligned with the query sequence, are considered for the purposes of manually adjusting the percent identity score. That is, only query residue positions outside the farthest N- and C-terminal residues of the subject sequence.

[0107] For example, a 90 amino acid residue subject sequence is aligned with a 100 residue query sequence to determine percent identity. The deletion occurs at the N-terminus of the subject sequence and therefore, the FASTDB alignment does not show a matching/alignment of the first 10 residues at the N-terminus. The 10 unpaired residues represent 10% of the sequence (number of residues at the N- and C-termini not matched/total number of residues in the query sequence) so 10% is subtracted from the percent identity score calculated by the FASTDB program. If the remaining 90 residues were-perfectly matched the final percent identity would be 90%. In another example, a 90 residue subject sequence is compared with a 100 residue query sequence. This time the deletions are internal deletions so there are no residues at the N- or C-termini of the subject sequence which are not matched/aligned with the query. In this case the percent identity calculated by FASTDB is not manually corrected. Once again, only residue positions outside the N- and C-terminal ends of the subject sequence, as displayed in the FASTDB alignment, which are not matched/aligned with the query sequnce are manually corrected for. No other manual corrections are to made for the purposes of the present invention.

[0108] The polynucleotide variants of the invention may contain alterations in the coding regions, non-coding regions, or both. Especially preferred are polynucleotide variants containing alterations which produce silent substitutions, additions, or deletions, but do not alter the properties or activities of the encoded polypeptide. Nucleotide variants produced by silent substitutions due to the degeneracy of the genetic code are preferred. Moreover, polypeptide variants in which less than 50, less than 40, less than 30, less than 20, less than 10, or 5-50, 5-25, 5-10, 1-5, or 1-2 amino acids are substituted, deleted, or added in any combination are also preferred. Polynucleotide variants can be produced for a variety of reasons, e.g., to optimize codon expression for a particular host (change codons in the human mRNA to those preferred by a bacterial host such as E. coli).

[0109] Naturally occurring variants are called “allelic variants,” and refer to one of several alternate forms of a gene occupying a given locus on a chromosome of an organism. (Genes II, Lewin, B., ed., John Wiley & Sons, New York (1985)). These allelic variants can vary at either the polynucleotide and/or polypeptide level and are included in the present invention. Alternatively, non-naturally occurring variants may be produced by mutagenesis techniques or by direct synthesis.

[0110] Using known methods of protein engineering and recombinant DNA technology, variants may be generated to improve or alter the characteristics of the polypeptides of the present invention. For instance, one or more amino acids can be deleted from the N-terminus or C-terminus of the polypeptide of the present invention without substantial loss of biological function. As an example, Ron et al. (J. Biol. Chem. 268: 2984-2988 (1993)) reported variant KGF proteins having heparin binding activity even after deleting 3, 8, or 27 amino-terminal amino acid residues. Similarly, Interferon gamma exhibited up to ten times higher activity after deleting 8-10 amino acid residues from the carboxy terminus of this protein. (Dobeli et al., J. Biotechnology 7:199-216 (1988).)

[0111] Moreover, ample evidence demonstrates that variants often retain a biological activity similar to that of the naturally occurring protein. For example, Gayle and coworkers (J. Biol. Chem. 268:22105-22111 (1993)) conducted extensive mutational analysis of human cytokine IL-1a. They used random mutagenesis to generate over 3,500 individual IL-1a mutants that averaged 2.5 amino acid changes per variant over the entire length of the molecule. Multiple mutations were examined at every possible amino acid position. The investigators found that “[m]ost of the molecule could be altered with little effect on either [binding or biological activity].” In fact, only 23 unique amino acid sequences, out of more than 3,500 nucleotide sequences examined, produced a protein that significantly differed in activity from wild-type.

[0112] Furthermore, even if deleting one or more amino acids from the N-terminus or C-terminus of a polypeptide results in modification or loss of one or more biological functions, other biological activities may still be retained. For example, the ability of a deletion variant to induce and/or to bind antibodies which recognize the secreted form will likely be retained when less than the majority of the residues of the secreted form are removed from the N-terminus or C-terminus. Whether a particular polypeptide lacking N- or C-terminal residues of a protein retains such immunogenic activities can readily be determined by routine methods described herein and otherwise known in the art.

[0113] Thus, the invention further includes polypeptide variants which show a functional activity (e.g., biological activity) of the polypeptides of the invention. Such variants include deletions, insertions, inversions, repeats, and substitutions selected according to general rules known in the art so as have little effect on activity.

[0114] The present application is directed to nucleic acid molecules at least 80%, 85%, 90%, 95%, 96%, 97%, 98%, 99% or 100% identical to the nucleic acid sequences disclosed herein, (e.g., encoding a polypeptide having the amino acid sequence of an N and/or C terminal deletion), irrespective of whether they encode a polypeptide having functional activity. This is because even where a particular nucleic acid molecule does not encode a polypeptide having functional activity, one of skill in the art would still know how to use the nucleic acid molecule, for instance, as a hybridization probe or a polymerase chain reaction (PCR) primer. Uses of the nucleic acid molecules of the present invention that do not encode a polypeptide having functional activity include, inter alia, (1) isolating a gene or allelic or splice variants thereof in a cDNA library; (2) in situ hybridization (e.g., “FISH”) to metaphase chromosomal spreads to provide precise chromosomal location of the gene, as described in Verma et al., Human Chromosomes: A Manual of Basic Techniques, Pergamon Press, New York (1988); (3) Northern Blot analysis for detecting mRNA expression in specific tissues (e.g., normal or diseased tissues); and (4) in situ hybridization (e.g., histochemistry) for detecting mRNA expression in specific tissues (e.g., normal or diseased tissues).

[0115] Preferred, however, are nucleic acid molecules having sequences at least 80%, 85%, 90%, 95%, 96%, 97%, 98%, 99% or 100% identical to the nucleic acid sequences disclosed herein, which do, in fact, encode a polypeptide having functional activity. By a polypeptide having “functional activity” is meant, a polypeptide capable of displaying one or more known functional activities associated with a full-length (complete) protein of the invention. Such functional activities include, but are not limited to, biological activity, antigenicity [ability to bind (or compete with a polypeptide of the invention for binding) to an anti-polypeptide of the invention antibody], immunogenicity (ability to generate antibody which binds to a specific polypeptide of the invention), ability to form multimers with polypeptides of the invention, and ability to bind to a receptor or ligand for a polypeptide of the invention.

[0116] The functional activity of the polypeptides, and fragments, variants and derivatives of the invention, can be assayed by various methods.

[0117] For example, in one embodiment where one is assaying for the ability to bind or compete with a full-length polypeptide of the present invention for binding to an anti-polypetide antibody, various immunoassays known in the art can be used, including but not limited to, competitive and non-competitive assay systems using techniques such as radioimmunoassays, ELISA (enzyme linked immunosorbent assay), “sandwich” immunoassays, immunoradiometric assays, gel diffusion precipitation reactions, immunodiffusion assays, in situ immunoassays (using colloidal gold, enzyme or radioisotope labels, for example), western blots, precipitation reactions, agglutination assays (e.g., gel agglutination assays, hemagglutination assays), complement fixation assays, immunofluorescence assays, protein A assays, and immunoelectrophoresis assays, etc. In one embodiment, antibody binding is detected by detecting a label on the primary antibody. In another embodiment, the primary antibody is detected by detecting binding of a secondary antibody or reagent to the primary antibody. In a further embodiment, the secondary antibody is labeled. Many means are known in the art for detecting binding in an immunoassay and are within the scope of the present invention.

[0118] In another embodiment, where a ligand is identified, or the ability of a polypeptide fragment, variant or derivative of the invention to multimerize is being evaluated, binding can be assayed, e.g., by means well-known in the art, such as, for example, reducing and non-reducing gel chromatography, protein affinity chromatography, and affinity blotting. See generally, Phizicky et al., Microbiol. Rev. 59:94-123 (1995). In another embodiment, the ability of physiological correlates of a polypeptide of the present invention to bind to a substrate(s) of the polypeptide of the invention can be routinely assayed using techniques known in the art.

[0119] In addition, assays described herein (see Examples) and otherwise known in the art may routinely be applied to measure the ability of polypeptides of the present invention and fragments, variants and derivatives thereof to elicit polypeptide related biological activity (either in vitro or in vivo). Other methods will be known to the skilled artisan and are within the scope of the invention.

[0120] Of course, due to the degeneracy of the genetic code, one of ordinary skill in the art will immediately recognize that a large number of the nucleic acid molecules having a sequence at least 80%, 85%, 90%, 95%, 96%, 97%, 98%, 99%, or 100% identical to, for example, the nucleic acid sequence of the cDNA contained in Clone ID NO:Z, the nucleic acid sequence referred to in Table 1A (SEQ ID NO:X), the nucleic acid sequence disclosed in Table 2 (e.g, the nucleic acid sequence delineated in columns 8 and 9) or fragments thereof, will encode polypeptides “having functional activity.” In fact, since degenerate variants of any of these nucleotide sequences all encode the same polypeptide, in many instances, this will be clear to the skilled artisan even without performing the above described comparison assay. It will be further recognized in the art that, for such nucleic acid molecules that are not degenerate variants, a reasonable number will also encode a polypeptide having functional activity. This is because the skilled artisan is fully aware of amino acid substitutions that are either less likely or not likely to significantly effect protein function (e.g., replacing one aliphatic amino acid with a second aliphatic amino acid), as further described below.

[0121] For example, guidance concerning how to make phenotypically silent amino acid substitutions is provided in Bowie et al., “Deciphering the Message in Protein Sequences: Tolerance to Amino Acid Substitutions,” Science 247:1306-1310 (1990), wherein the authors indicate that there are two main strategies for studying the tolerance of an amino acid sequence to change.

[0122] The first strategy exploits the tolerance of amino acid substitutions by natural selection during the process of evolution. By comparing amino acid sequences in different species, conserved amino acids can be identified. These conserved amino acids are likely important for protein function. In contrast, the amino acid positions where substitutions have been tolerated by natural selection indicates that these positions are not critical for protein function. Thus, positions tolerating amino acid substitution could be modified while still maintaining biological activity of the protein.

[0123] The second strategy uses genetic engineering to introduce amino acid changes at specific positions of a cloned gene to identify regions critical for protein function. For example, site directed mutagenesis or alanine-scanning mutagenesis (introduction of single alanine mutations at every residue in the molecule) can be used. See Cunningham and Wells, Science 244:1081-1085 (1989). The resulting mutant molecules can then be tested for biological activity.

[0124] As the authors state, these two strategies have revealed that proteins are surprisingly tolerant of amino acid substitutions. The authors further indicate which amino acid changes are likely to be permissive at certain amino acid positions in the protein. For example, most buried (within the tertiary structure of the protein) amino acid residues require nonpolar side chains, whereas few features of surface side chains are generally conserved. Moreover, tolerated conservative amino acid substitutions involve replacement of the aliphatic or hydrophobic amino acids Ala, Val, Leu and Ile; replacement of the hydroxyl residues Ser and Thr; replacement of the acidic residues Asp and Glu; replacement of the amide residues Asn and Gln, replacement of the basic residues Lys, Arg, and His; replacement of the aromatic residues Phe, Tyr, and Trp, and replacement of the small-sized amino acids Ala, Ser, Thr, Met, and Gly. Besides conservative amino acid substitution, variants of the present invention include (i) substitutions with one or more of the non-conserved amino acid residues, where the substituted amino acid residues may or may not be one encoded by the genetic code, or (ii) substitutions with one or more of the amino acid residues having a substituent group, or (iii) fusion of the mature polypeptide with another compound, such as a compound to increase the stability and/or solubility of the polypeptide (for example, polyethylene glycol), (iv) fusion of the polypeptide with additional amino acids, such as, for example, an IgG Fc fusion region peptide, serum albumin (preferably human serum albumin) or a fragment thereof, or leader or secretory sequence, or a sequence facilitating purification, or (v) fusion of the polypeptide with another compound, such as albumin (including but not limited to recombinant albumin (see, e.g., U.S. Pat. No. 5,876,969, issued Mar. 2, 1999, EP Patent 0 413 622, and U.S. Pat. No. 5,766,883, issued Jun. 16, 1998, herein incorporated by reference in their entirety)). Such variant polypeptides are deemed to be within the scope of those skilled in the art from the teachings herein.

[0125] For example, polypeptide variants containing amino acid substitutions of charged amino acids with other charged or neutral amino acids may produce proteins with improved characteristics, such as less aggregation. Aggregation of pharmaceutical formulations both reduces activity and increases clearance due to the aggregate's immunogenic activity. See Pinckard et al., Clin. Exp. Immunol. 2:331-340 (1967); Robbins et al., Diabetes 36: 838-845 (1987); Cleland et al., Crit. Rev. Therapeutic Drug Carrier Systems 10:307-377 (1993).

[0126] A further embodiment of the invention relates to polypeptides which comprise the amino acid sequence of a polypeptide having an amino acid sequence which contains at least one amino acid substitution, but not more than 50 amino acid substitutions, even more preferably, not more than 40 amino acid substitutions, still more preferably, not more than 30 amino acid substitutions, and still even more preferably, not more than 20 amino acid substitutions from a polypeptide sequence disclosed herein. Of course it is highly preferable for a polypeptide to have an amino acid sequence which comprises the amino acid sequence of a polypeptide of SEQ ID NO:Y, an amino acid sequence encoded by SEQ ID NO:X, an amino acid sequence encoded by the portion of SEQ ID NO:X as defined in columns 8 and 9 of Table 2, an amino acid sequence encoded by the complement of SEQ ID NO:X, and/or an amino acid sequence encoded by cDNA contained in Clone ID NO:Z which contains, in order of ever-increasing preference, at least one, but not more than 10, 9, 8, 7, 6, 5, 4, 3, 2 or 1 amino acid substitutions.

[0127] In specific embodiments, the polypeptides of the invention comprise, or alternatively, consist of, fragments or variants of a reference amino acid sequence selected from: (a) the amino acid sequence of SEQ ID NO:Y or fragments thereof (e.g., the mature form and/or other fragments described herein); (b) the amino acid sequence encoded by SEQ ID NO:X or fragments thereof; (c) the amino acid sequence encoded by the complement of SEQ ID NO:X or fragments thereof, (d) the amino acid sequence encoded by the portion of SEQ ID NO:X as defined in columns 8 and 9 of Table 2 or fragments thereof, and (e) the amino acid sequence encoded by cDNA contained in Clone ID NO:Z or fragments thereof, wherein the fragments or variants have 1-5,5-10, 5-25, 5-50, 10-50 or 50-150, amino acid residue additions, substitutions, and/or deletions when compared to the reference amino acid sequence. In preferred embodiments, the amino acid substitutions are conservative. Polynucleotides encoding these polypeptides are also encompassed by the invention.

[0128] Polynucleotide and Polypeptide Fragments

[0129] The present invention is also directed to polynucleotide fragments of the polynucleotides (nucleic acids) of the invention. In the present invention, a “polynucleotide fragment” refers to a polynucleotide having a nucleic acid sequence which, for example: is a portion of the cDNA contained in Clone ID NO:Z or the complementary strand thereto; is a portion of the polynucleotide sequence encoding the polypeptide encoded by the cDNA contained in Clone ID NO:Z or the complementary strand thereto; is a portion of a polynucleotide sequence encoding the amino acid sequence encoded by the region of SEQ ID NO:X as defined in columns 8 and 9 of Table 2 or the complementary strand thereto; is a portion of the polynucleotide sequence of SEQ ID NO:X as defined in columns 8 and 9 of Table 2 or the complementary strand thereto; is a portion of the polynucleotide sequence in SEQ ID NO:X or the complementary strand thereto; is a polynucleotide sequence encoding a portion of the polypeptide of SEQ ID NO:Y; is a polynucleotide sequence encoding a portion of a polypeptide encoded by SEQ ID NO:X; is a polynucleotide sequence encoding a portion of a polypeptide encoded by the complement of the polynucleotide sequence in SEQ ID NO:X; is a portion of a polynucleotide sequence encoding the amino acid sequence encoded by the region of SEQ ID NO:B as defined in column 6 of Table 1B or the complementary strand thereto; or is a portion of the polynucleotide sequence of SEQ ID NO:B as defined in column 6 of Table 1B or the complementary strand thereto.

[0130] The polynucleotide fragments of the invention are preferably at least about 15 nt, and more preferably at least about 20 nt, still more preferably at least about 30 nt, and even more preferably, at least about 40 nt, at least about 50 nt, at least about 75 nt, or at least about 150 nt in length. A fragment “at least 20 nt in length,” for example, is intended to include 20 or more contiguous bases from the cDNA sequence contained in Clone ID NO:Z, or the nucleotide sequence shown in SEQ ID NO:X or the complementary stand thereto. In this context “about” includes the particularly recited value or a value larger or smaller by several (5, 4, 3, 2, or 1) nucleotides, at either terminus or at both termini. These nucleotide fragments have uses that include, but are not limited to, as diagnostic probes and primers as discussed herein. Of course, larger fragments (e.g., at least 160, 170, 180, 190, 200, 250, 500, 600, 1000, or 2000 nucleotides in length) are also encompassed by the invention.

[0131] Moreover, representative examples of polynucleotide fragments of the invention comprise, or alternatively consist of, a sequence from about nucleotide number 1-50, 51-100, 101-150, 151-200, 201-250, 251-300, 301-350, 351-400, 401-450, 451-500, 501-550, 551-600, 601-650, 651-700, 701-750, 751-800, 801-850, 851-900, 901-950, 951-1000, 1001-1050, 1051-1100, 1101-1150, 1151-1200, 1201-1250, 1251-1300, 1301-1350, 1351-1400, 1401-1450, 1451-1500, 1501-1550, 1551-1600, 1601-1650, 1651-1700, 1701-1750, 1751-1800, 1801-1850, 1851-1900, 1901-1950, 1951-2000, 2001-2050, 2051-2100, 2101-2150, 2151-2200, 2201-2250, 2251-2300, 2301-2350, 2351-2400, 2401-2450, 2451-2500, 2501-2550, 2551-2600, 2601-2650, 2651-2700, 2701-2750, 2751-2800, 2801-2850, 2851-2900, 2901-2950, 2951-3000, 3001-3050, 3051-3100, 3101-3150, 3151-3200, 3201-3250, 3251-3300, 3301-3350, 3351-3400, 3401-3450, 3451-3500, 3501-3550, 3551-3600, 3601-3650, 3651-3700, 3701-3750, 3751-3800, 3801-3850, 3851-3900, 3901-3950, 3951-4000, 4001-4050, 4051-4100, 4101-4150, 4151-4200, 4201-4250, 4251-4300, 4301-4350, 4351-4400, 4401-4450, 4451-4500, 4501-4550, 4551-4600, 4601-4650, 4651-4700, 4701-4750, 4751-4800, 4801-4850, 4851-4900, 4901-4950, 4951-5000, 5001-5050, 5051-5100, 5101-5150, 5151-5200, 5201-5250, 5251-5300, 5301-5350, 5351-5400, 5401-5450, 5451-5500, 5501-5550, 5551-5600, 5601-5650, 5651-5700, 5701-5750, 5751-5800, 5801-5850, 5851-5900, 5901-5950, 5951-6000, 6001-6050, 6051-6100, 6101-6150, 6151-6200, 6201-6250, 6251-6300, 6301-6350, 6351-6400, 6401-6450, 6451-6500, 6501-6550, 6551-6600, 6601-6650, 6651-6700, 6701-6750, 6751-6800, 6801-6850, 6851-6900, 6901-6950, 6951-7000, 7001-7050, 7051-7100, 7101-7150, 7151-7200, 7201-7250, 7251-7300 or 7301 to the end of SEQ ID NO:X, or the complementary strand thereto. In this context “about” includes the particularly recited range or a range larger or smaller by several (5, 4, 3, 2, or 1) nucleotides, at either terminus or at both termini. Preferably, these fragments encode a polypeptide which has a functional activity (e.g., biological activity). More preferably, these polynucleotides can be used as probes or primers as discussed herein. Polynucleotides which hybridize to one or more of these polynucleotides under stringent hybridization conditions or alternatively, under lower stringency conditions are also encompassed by the invention, as are polypeptides encoded by these polynucleotides.

[0132] Further representative examples of polynucleotide fragments of the invention comprise, or alternatively consist of, a sequence from about nucleotide number 1-50, 51-100, 101-150, 151-200, 201-250, 251-300, 301-350, 351-400, 401-450, 451-500, 501-550, 551-600, 601-650, 651-700, 701-750, 751-800, 801-850, 851-900, 901-950, 951-1000, 1001-1050, 1051-1100, 1101-1150, 1151-1200, 1201-1250, 1251-1300, 1301-1350, 1351-1400, 1401-1450, 1451-1500, 1501-1550, 1551-1600, 1601-1650, 1651-1700, 1701-1750, 1751-1800, 1801-1850, 1851-1900, 1901-1950, 1951-2000, 2001-2050, 2051-2100, 2101-2150, 2151-2200, 2201-2250, 2251-2300, 2301-2350, 2351-2400, 2401-2450, 2451-2500, 2501-2550, 2551-2600, 2601-2650, 2651-2700, 2701-2750, 2751-2800, 2801-2850, 2851-2900, 2901-2950, 2951-3000, 3001-3050, 3051-3100, 3101-3150, 3151-3200, 3201-3250, 3251-3300, 3301-3350, 3351-3400, 3401-3450, 3451-3500, 3501-3550, 3551-3600, 3601-3650, 3651-3700, 3701-3750, 3751-3800, 3801-3850, 3851-3900, 3901-3950, 3951-4000, 4001-4050, 4051-4100, 4101-4150, 4151-4200, 4201-4250, 4251-4300, 4301-4350, 4351-4400, 4401-4450, 4451-4500, 4501-4550, 4551-4600, 4601-4650, 4651-4700, 4701-4750, 4751-4800, 4801-4850, 4851-4900, 4901-4950, 4951-5000, 5001-5050, 5051-5100, 5101-5150, 5151-5200, 5201-5250, 5251-5300, 5301-5350, 5351-5400, 5401-5450, 5451-5500, 5501-5550, 5551-5600, 5601-5650, 5651-5700, 5701-5750, 5751-5800, 5801-5850, 5851-5900, 5901-5950, 5951-6000, 6001-6050, 6051-6100, 6101-6150, 6151-6200, 6201-6250, 6251-6300, 6301-6350, 6351-6400, 6401-6450, 6451-6500, 6501-6550, 6551-6600, 6601-6650, 6651-6700, 6701-6750, 6751-6800, 6801-6850, 6851-6900, 6901-6950, 6951-7000, 7001-7050, 7051-7100, 7101-7150, 7151-7200, 7201-7250, 7251-7300 or 7301 to the end of the cDNA sequence contained in Clone ID NO:Z, or the complementary strand thereto. In this context “about” includes the particularly recited range or a range larger or smaller by several (5, 4, 3, 2, or 1) nucleotides, at either terminus or at both termini. Preferably, these fragments encode a polypeptide which has a functional activity (e.g., biological activity). More preferably, these polynucleotides can be used as probes or primers as discussed herein. Polynucleotides which hybridize to one or more of these polynucleotides under stringent hybridization conditions or alternatively, under lower stringency conditions are also encompassed by the invention, as are polypeptides encoded by these polynucleotides.

[0133] Moreover, representative examples of polynucleotide fragments of the invention comprise, or alternatively consist of, a nucleic acid sequence comprising one, two, three, four, five, six, seven, eight, nine, ten, or more of the above described polynucleotide fragments of the invention in combination with a polynucleotide sequence delineated in Table 1B column 6. Additional, representative examples of polynucleotide fragments of the invention comprise, or alternatively consist of, a nucleic acid sequence comprising one, two, three, four, five, six, seven, eight, nine, ten, or more of the above described polynucleotide fragments of the invention in combination with a polynucleotide sequence that is the complementary strand of a sequence delineated in column 6 of Table 1B. In further embodiments, the above-described polynucleotide fragments of the invention comprise, or alternatively consist of, sequences delineated in Table 1B, column 6, and have a nucleic acid sequence which is different from that of the BAC fragment having the sequence disclosed in SEQ ID NO:B (see Table 1B, column 5). In additional embodiments, the above-described polynucleotide fragments of the invention comprise, or alternatively consist of, sequences delineated in Table 1B, column 6, and have a nucleic acid sequence which is different from that published for the BAC clone identified as BAC ID NO:A (see Table 1B, column 4). In additional embodiments, the above-described polynucleotides of the invention comprise, or alternatively consist of, sequences delineated Table 1B, column 6, and have a nucleic acid sequence which is different from that contained in the BAC clone identified as BAC ID NO:A (see Table 1B, column 4). Polypeptides encoded by these polynucleotides, other polynucleotides that encode these polypeptides, and antibodies that bind these polypeptides are also encompassed by the invention. Additionally, fragments and variants of the above-described polynucleotides and polypeptides are also encompassed by the invention.

[0134] In additional specific embodiments, polynucleotides of the invention comprise, or alternatively consist of, one, two, three, four, five, six, seven, eight, nine, ten, or more fragments of the sequences delineated in column 6 of Table 1B, and the polynucleotide sequence of SEQ ID NO:X (e.g., as defined in Table 1B, column 2) or fragments or variants thereof. Polypeptides encoded by these polynucleotides, other polynucleotides that encode these polypeptides, and antibodies that bind these polypeptides are also encompassed by the invention.

[0135] In additional specific embodiments, polynucleotides of the invention comprise, or alternatively consist of, one, two, three, four, five, six, seven, eight, nine, ten, or more fragments of the sequences delineated in column 6 of Table 1B which correspond to the same Clone ID NO:Z (see Table 1B, column 1), and the polynucleotide sequence of SEQ ID NO:X (e.g., as defined in Table 1A or 1B) or fragments or variants thereof. Polypeptides encoded by these polynucleotides, other polynucleotides that encode these polypeptides, and antibodies that bind these polypeptides are also encompassed by the invention.

[0136] In further specific embodiments, polynucleotides of the invention comprise, or alternatively consist of, one, two, three, four, five, six, seven, eight, nine, ten, or more fragments of the sequences delineated in the same row of column 6 of Table 1B, and the polynucleotide sequence of SEQ ID NO:X (e.g., as defined in Table 1A or 1B) or fragments or variants thereof. Polypeptides encoded by these polynucleotides, other polynucleotides that encode these polypeptides, and antibodies that bind these polypeptides are also encompassed by the invention.

[0137] In additional specific embodiments, polynucleotides of the invention comprise, or alternatively consist of a polynucleotide sequence in which the 3′ 10 polynucleotides of one of the sequences delineated in column 6 of Table 1B and the 5′ 10 polynucleotides of the sequence of SEQ ID NO:X are directly contiguous. Nucleic acids which hybridize to the complement of these 20 contiguous polynucleotides under stringent hybridization conditions or alternatively, under lower stringency conditions, are also encompassed by the invention. Polypeptides encoded by these polynucleotides and/or nucleic acids, other polynucleotides and/or nucleic acids that encode these polypeptides, and antibodies that bind these polypeptides are also encompassed by the invention. Additionally, fragments and variants of the above-described polynucleotides, nucleic acids, and polypeptides are also encompassed by the invention.

[0138] In additional specific embodiments, polynucleotides of the invention comprise, or alternatively consist of a polynucleotide sequence in which the 3′ 10 polynucleotides of one of the sequences delineated in column 6 of Table 1B and the 5′ 10 polynucleotides of a fragment or variant of the sequence of SEQ ID NO:X (e.g., as described herein) are directly contiguous Nucleic acids which hybridize to the complement of these 20 contiguous polynucleotides under stringent hybridization conditions or alternatively, under lower stringency conditions, are also encompassed by the invention. Polypeptides encoded by these polynucleotides and/or nucleic acids, other polynucleotides and/or nucleic acids encoding these polypeptides, and antibodies that bind these polypeptides are also encompassed by the invention. Additionally, fragments and variants of the above-described polynucleotides, nucleic acids, and polypeptides are also encompassed by the invention.

[0139] In further specific embodiments, polynucleotides of the invention comprise, or alternatively consist of a polynucleotide sequence in which the 3′ 10 polynucleotides of a fragment or variant of the sequence of SEQ ID NO:X and the 5′ 10 polynucleotides of the sequence of one of the sequences delineated in column 6 of Table 1B are directly contiguous. Nucleic acids which hybridize to the complement of these 20 contiguous polynucleotides under stringent hybridization conditions or alternatively, under lower stringency conditions, are also encompassed by the invention. Polypeptides encoded by these polynucleotides and/or nucleic acids, other polynucleotides and/or nucleic acids encoding these polypeptides, and antibodies that bind these polypeptides are also encompassed by the invention. Additionally, fragments and variants of the above-described polynucleotides, nucleic acids, and polypeptides are also encompassed by the invention.

[0140] In specific embodiments, polynucleotides of the invention comprise, or alternatively consist of a polynucleotide sequence in which the 3′ 10 polynucleotides of one of the sequences delineated in column 6 of Table 1B and the 5′ 10 polynucleotides of another sequence in column 6 are directly contiguous. In preferred embodiments, the 3′ 10 polynucleotides of one of the sequences delineated in column 6 of Table 1B is directly contiguous with the 5′ 10 polynucleotides of the next sequential exon delineated in Table 1B, column 6. Nucleic acids which hybridize to the complement of these 20 contiguous polynucleotides under stringent hybridization conditions or alternatively, under lower stringency conditions, are also encompassed by the invention. Polypeptides encoded by these polynucleotides and/or nucleic acids, other polynucleotides and/or nucleic acids encoding these polypeptides, and antibodies that bind these polypeptides are also encompassed by the invention. Additionally, fragments and variants of the above-described polynucleotides, nucleic acids, and polypeptides are also encompassed by the invention.

[0141] In the present invention, a “polypeptide fragment” refers to an amino acid sequence which is a portion of that contained in SEQ ID NO:Y, a portion of an amino acid sequence encoded by the portion of SEQ ID NO:X as defined in columns 8 and 9 of Table 2, a portion of an amino acid sequence encoded by the polynucleotide sequence of SEQ ID NO:X, a portion of an amino acid sequence encoded by the complement of the polynucleotide sequence in SEQ ID NO:X, and/or a portion of an amino acid sequence encoded by the cDNA contained in Clone ID NO:Z. Protein (polypeptide) fragments may be “free-standing,” or comprised within a larger polypeptide of which the fragment forms a part or region, most preferably as a single continuous region. Representative examples of polypeptide fragments of the invention, include, for example, fragments comprising, or alternatively consisting of, from about amino acid number 1-20, 21-40, 41-60, 61-80, 81-100, 101-120, 121-140, 141-160, 161-180, 181-200, 201-220, 221-240, 241-260, 261-280, 281-300, 301-320, 321-340, 341-360, 361-380, 381-400, 401-420, 421-440, 441-460, 461-480, 481-500, 501-520, 521-540, 541-560, 561-580, 581-600, 601-620, 621-640, 641-660, 661-680, 681-700, 701-720, 721-740, 741-760, 761-780, 781-800, 801-820, 821-840, 841-860, 861-880, 881-900, 901-920, 921-940, 941-960, 961-980, 981-1000, 1001-1020, 1021-1040, 1041-1060, 1061-1080, 1081-1100, 1101-1120, 1121-1140, 1141-1160, 1161-1180, 1181-1200, 1201-1220, 1221-1240, 1241-1260, 1261-1280, 1281-1300, 1301-1320, 1321-1340, 1341-1360, 1361-1380, 1381-1400, 1401-1420, 1421-1440, or 1441 to the end of the coding region of cDNA and SEQ ID NO: Y. In a preferred embodiment, polypeptide fragments of the invention include, for example, fragments comprising, or alternatively consisting of, from about amino acid number 1-20, 21-40, 41-60, 61-80, 81-100, 101-120, 121-140, 141-160, 161-180, 181-200, 201-220, 221-240, 241-260, 261-280, 281-300, 301-320, 321-340, 341-360, 361-380, 381-400, 401-420, 421-440, 441-460, 461-480, 481-500, 501-520, 521-540, 541-560, 561-580, 581-600, 601-620, 621-640, 641-660, 661-680, 681-700, 701-720, 721-740, 741-760, 761-780, 781-800, 801-820, 821-840, 841-860, 861-880, 881-900, 901-920, 921-940, 941-960, 961-980, 981-1000, 1001-1020, 1021-1040, 1041-1060, 1061-1080, 1081-1100, 1101-1120, 1121-1140, 1141-1160, 1161-1180, 1181-1200, 1201-1220, 1221-1240, 1241-1260, 1261-1280, 1281-1300, 1301-1320, 1321-1340, 1341-1360, 1361-1380, 1381-1400, 1401-1420, 1421-1440, or 1441 to the end of the coding region of SEQ ID NO:Y. Moreover, polypeptide fragments of the invention may be at least about 10, 15, 20, 25, 30, 35, 40, 45, 50, 55, 60, 65, 70, 75, 80, 85, 90, 100, 110, 120, 130, 140, or 150 amino acids in length. In this context “about” includes the particularly recited ranges or values, or ranges or values larger or smaller by several (5, 4, 3, 2, or 1) amino acids, at either extreme or at both extremes. Polynucleotides encoding these polypeptide fragments are also encompassed by the invention.

[0142] Even if deletion of one or more amino acids from the N-terminus of a protein results in modification of loss of one or more biological functions of the protein, other functional activities (e.g., biological activities, ability to multimerize, ability to bind a ligand) may still be retained. For example, the ability of shortened muteins to induce and/or bind to antibodies which recognize the complete or mature forms of the polypeptides generally will be retained when less than the majority of the residues of the complete or mature polypeptide are removed from the N-terminus. Whether a particular polypeptide lacking N-terminal residues of a complete polypeptide retains such immunologic activities can readily be determined by routine methods described herein and otherwise known in the art. It is not unlikely that a mutein with a large number of deleted N-terminal amino acid residues may retain some biological or immunogenic activities. In fact, peptides composed of as few as six amino acid residues may often evoke an immune response.

[0143] Accordingly, polypeptide fragments include the secreted protein as well as the mature form. Further preferred polypeptide fragments include the secreted protein or the mature form having a continuous series of deleted residues from the amino or the carboxy terminus, or both. For example, any number of amino acids, ranging from 1-60, can be deleted from the amino terminus of either the secreted polypeptide or the mature form. Similarly, any number of amino acids, ranging from 1-30, can be deleted from the carboxy terminus of the secreted protein or mature form. Furthermore, any combination of the above amino and carboxy terminus deletions are preferred. Similarly, polynucleotides encoding these polypeptide fragments are also preferred.

[0144] The present invention further provides polypeptides having one or more residues deleted from the amino terminus of the amino acid sequence of a polypeptide disclosed herein (e.g., a polypeptide of SEQ ID NO:Y, a polypeptide encoded by the polynucleotide sequence contained in SEQ ID NO:X or the complement thereof, a polypeptide encoded by the portion of SEQ ID NO:X as defined in columns 8 and 9 of Table 2, a polypeptide encoded by the portion of SEQ ID NO:B as defined in column 6 of Table 1B, and/or a polypeptide encoded by the cDNA contained in Clone ID NO:Z). In particular, N-terminal deletions may be described by the general formula m-q, where q is a whole integer representing the total number of amino acid residues in a polypeptide of the invention (e.g., the polypeptide disclosed in SEQ ID NO:Y, or the polypeptide encoded by the portion of SEQ ID NO:X as defined in columns 8 and 9 of Table 2), and m is defined as any integer ranging from 2 to q-6. Polynucleotides encoding these polypeptides are also encompassed by the invention.

[0145] The present invention further provides polypeptides having one or more residues from the carboxy terminus of the amino acid sequence of a polypeptide disclosed herein (e.g., a polypeptide of SEQ ID NO:Y, a polypeptide encoded by the polynucleotide sequence contained in SEQ ID NO:X, a polypeptide encoded by the portion of SEQ ID NO:X as defined in columns 8 and 9 of Table 2, and/or a polypeptide encoded by the cDNA contained in Clone ID NO:Z). In particular, C-terminal deletions may be described by the general formula 1-n, where n is any whole integer ranging from 6 to q-1, and where n corresponds to the position of amino acid residue in a polypeptide of the invention. Polynucleotides encoding these polypeptides are also encompassed by the invention.

[0146] In addition, any of the above described N- or C-terminal deletions can be combined to produce a N- and C-terminal deleted polypeptide. The invention also provides polypeptides having one or more amino acids deleted from both the amino and the carboxyl termini, which may be described generally as having residues m-n of a polypeptide encoded by SEQ ID NO:X (e.g., including, but not limited to, the preferred polypeptide disclosed as SEQ ID NO:Y and the polypeptide encoded by the portion of SEQ ID NO:X as defined in columns 8 and 9 of Table 2), the cDNA contained in Clone ID NO:Z, and/or the complement thereof, where n and m are integers as described above. Polynucleotides encoding these polypeptides are also encompassed by the invention.

[0147] Also as mentioned above, even if deletion of one or more amino acids from the C-terminus of a protein results in modification of loss of one or more biological functions of the protein, other functional activities (e.g., biological activities, ability to multimerize, ability to bind a ligand) may still be retained. For example the ability of the shortened mutein to induce and/or bind to antibodies which recognize the complete or mature forms of the polypeptide generally will be retained when less than the majority of the residues of the complete or mature polypeptide are removed from the C-terminus. Whether a particular polypeptide lacking C-terminal residues of a complete polypeptide retains such immunologic activities can readily be determined by routine methods described herein and otherwise known in the art. It is not unlikely that a mutein with a large number of deleted C-terminal amino acid residues may retain some biological or immunogenic activities. In fact, peptides composed of as few as six amino acid residues may often evoke an immune response.

[0148] The present application is also directed to proteins containing polypeptides at least 80%, 85%, 90%, 95%, 96%, 97%, 98% or 99% identical to a polypeptide sequence set forth herein. In preferred embodiments, the application is directed to proteins containing polypeptides at least 80%, 85%, 90%, 95%, 96%, 97%, 98% or 99% identical to polypeptides having the amino acid sequence of the specific N- and C-terminal deletions. Polynucleotides encoding these polypeptides are also encompassed by the invention.

[0149] Any polypeptide sequence encoded by, for example, the polynucleotide sequences set forth as SEQ ID NO:X or the complement thereof, (presented, for example, in Tables 1A and 2), the cDNA contained in Clone ID NO:Z, or the polynucleotide sequence as defined in column 6 of Table 1B, may be analyzed to determine certain preferred regions of the polypeptide. For example, the amino acid sequence of a polypeptide encoded by a polynucleotide sequence of SEQ ID NO:X (e.g., the polypeptide of SEQ ID NO:Y and the polypeptide encoded by the portion of SEQ ID NO:X as defined in columns 8 and 9 of Table 2) or the cDNA contained in Clone ID NO:Z may be analyzed using the default parameters of the DNASTAR computer algorithm (DNASTAR, Inc., 1228 S. Park St., Madison, Wis. 53715 USA; http://www.dnastar.com/).

[0150] Polypeptide regions that may be routinely obtained using the DNASTAR computer algorithm include, but are not limited to, Garnier-Robson alpha-regions, beta-regions, turn-regions, and coil-regions; Chou-Fasman alpha-regions, beta-regions, and turn-regions; Kyte-Doolittle hydrophilic regions and hydrophobic regions; Eisenberg alpha- and beta-amphipathic regions; Karplus-Schulz flexible regions; Emini surface-forming regions; and Jameson-Wolf regions of high antigenic index. Among highly preferred polynucleotides of the invention in this regard are those that encode polypeptides comprising regions that combine several structural features, such as several (e.g., 1, 2, 3 or 4) of the features set out above.

[0151] Additionally, Kyte-Doolittle hydrophilic regions and hydrophobic regions, Emini surface-forming regions, and Jameson-Wolf regions of high antigenic index (i.e., containing four or more contiguous amino acids having an antigenic index of greater than or equal to 1.5, as identified using the default parameters of the Jameson-Wolf program) can routinely be used to determine polypeptide regions that exhibit a high degree of potential for antigenicity. Regions of high antigenicity are determined from data by DNASTAR analysis by choosing values which represent regions of the polypeptide which are likely to be exposed on the surface of the polypeptide in an environment in which antigen recognition may occur in the process of initiation of an immune response.

[0152] Preferred polypeptide fragments of the invention are fragments comprising, or alternatively, consisting of, an amino acid sequence that displays a functional activity (e.g. biological activity) of the polypeptide sequence of which the amino acid sequence is a fragment. By a polypeptide displaying a “functional activity” is meant a polypeptide capable of one or more known functional activities associated with a full-length protein, such as, for example, biological activity, antigenicity, immunogenicity, and/or multimerization, as described herein.

[0153] Other preferred polypeptide fragments are biologically active fragments. Biologically active fragments are those exhibiting activity similar, but not necessarily identical, to an activity of the polypeptide of the present invention. The biological activity of the fragments may include an improved desired activity, or a decreased undesirable activity.

[0154] In preferred embodiments, polypeptides of the invention comprise, or alternatively consist of, one, two, three, four, five or more of the antigenic fragments of the polypeptide of SEQ ID NO:Y, or portions thereof. Polynucleotides encoding these polypeptides are also encompassed by the invention.

[0155] The present invention encompasses polypeptides comprising, or alternatively consisting of, an epitope of: the polypeptide sequence shown in SEQ ID NO:Y; a polypeptide sequence encoded by SEQ ID NO:X or the complementary strand thereto; the polypeptide sequence encoded by the portion of SEQ ID NO:X as defined in columns 8 and 9 of Table 2; the polypeptide sequence encoded by the portion of SEQ ID NO:B as defined in column 6 of Table 1B or the complement thereto; the polypeptide sequence encoded by the cDNA contained in Clone ID NO:Z; or the polypeptide sequence encoded by a polynucleotide that hybridizes to the sequence of SEQ ID NO:X, the complement of the sequence of SEQ ID NO:X, the complement of a portion of SEQ ID NO:X as defined in columns 8 and 9 of Table 2, or the cDNA sequence contained in Clone ID NO:Z under stringent hybridization conditions or alternatively, under lower stringency hybridization as defined supra. The present invention further encompasses polynucleotide sequences encoding an epitope of a polypeptide sequence of the invention (such as, for example, the sequence disclosed in SEQ ID NO:X, or a fragment thereof), polynucleotide sequences of the complementary strand of a polynucleotide sequence encoding an epitope of the invention, and polynucleotide sequences which hybridize to the complementary strand under stringent hybridization conditions or alternatively, under lower stringency hybridization conditions defined supra.

[0156] The term “epitopes,” as used herein, refers to portions of a polypeptide having antigenic or immunogenic activity in an animal, preferably a mammal, and most preferably in a human. In a preferred embodiment, the present invention encompasses a polypeptide comprising an epitope, as well as the polynucleotide encoding this polypeptide. An “immunogenic epitope,” as used herein, is defined as a portion of a protein that elicits an antibody response in an animal, as determined by any method known in the art, for example, by the methods for generating antibodies described infra. (See, for example, Geysen et al., Proc. Natl. Acad. Sci. USA 81:3998-4002 (1983)). The term “antigenic epitope,” as used herein, is defined as a portion of a protein to which an antibody can immunospecifically bind its antigen as determined by any method well known in the art, for example, by the immunoassays described herein. Immunospecific binding excludes non-specific binding but does not necessarily exclude cross-reactivity with other antigens. Antigenic epitopes need not necessarily be immunogenic.

[0157] Fragments which function as epitopes may be produced by any conventional means. (See, e.g., Houghten, R. A., Proc. Natl. Acad. Sci. USA 82:5131-5135 (1985) further described in U.S. Pat. No. 4,631,211.)

[0158] In the present invention, antigenic epitopes preferably contain a sequence of at least 4, at least 5, at least 6, at least 7, more preferably at least 8, at least 9, at least 10, at least 11, at least 12, at least 13, at least 14, at least 15, at least 20, at least 25, at least 30, at least 40, at least 50, and, most preferably, between about 15 to about 30 amino acids. Preferred polypeptides comprising immunogenic or antigenic epitopes are at least 10, 15, 20, 25, 30, 35, 40, 45, 50, 55, 60, 65, 70, 75, 80, 85, 90, 95, or 100 amino acid residues in length. Additional non-exclusive preferred antigenic epitopes include the antigenic epitopes disclosed herein, as well as portions thereof. Antigenic epitopes are useful, for example, to raise antibodies, including monoclonal antibodies, that specifically bind the epitope. Preferred antigenic epitopes include the antigenic epitopes disclosed herein, as well as any combination of two, three, four, five or more of these antigenic epitopes. Antigenic epitopes can be used as the target molecules in immunoassays. (See, for instance, Wilson et al., Cell 37:767-778 (1984); Sutcliffe et al., Science 219:660-666 (1983)).

[0159] Non-limiting examples of epitopes of polypeptides that can be used to generate antibodies of the invention include a polypeptide comprising, or alternatively consisting of, at least one, two, three, four, five, six or more of the portion(s) of SEQ ID NO:Y specified in column 7 of Table 1A. These polypeptide fragments have been determined to bear antigenic epitopes of the proteins of the invention by the analysis of the Jameson-Wolf antigenic index which is included in the DNAStar suite of computer programs. By “comprise” it is intended that a polypeptide contains at least one, two, three, four, five, six or more of the portion(s) of SEQ ID NO:Y shown in column 7 of Table 1A, but it may contain additional flanking residues on either the amino or carboxyl termini of the recited portion. Such additional flanking sequences are preferably sequences naturally found adjacent to the portion; i.e., contiguous sequence shown in SEQ ID NO:Y. The flanking sequence may, however, be sequences from a heterolgous polypeptide, such as from another protein described herein or from a heterologous polypeptide not described herein. In particular embodiments, epitope portions of a polypeptide of the invention comprise one, two, three, or more of the portions of SEQ ID NO:Y shown in column 7 of Table 1A.

[0160] Similarly, immunogenic epitopes can be used, for example, to induce antibodies according to methods well known in the art. See, for instance, Sutcliffe et al., supra; Wilson et al., supra; Chow et al., Proc. Natl. Acad. Sci. USA 82:910-914; and Bittle et al., J. Gen. Virol. 66:2347-2354 (1985). Preferred immunogenic epitopes include the immunogenic epitopes disclosed herein, as well as any combination of two, three, four, five or more of these immunogenic epitopes. The polypeptides comprising one or more immunogenic epitopes may be presented for eliciting an antibody response together with a carrier protein, such as an albumin, to an animal system (such as rabbit or mouse), or, if the polypeptide is of sufficient length (at least about 25 amino acids), the polypeptide may be presented without a carrier. However, immunogenic epitopes comprising as few as 8 to 10 amino acids have been shown to be sufficient to raise antibodies capable of binding to, at the very least, linear epitopes in a denatured polypeptide (e.g., in Western blotting).

[0161] Epitope-bearing polypeptides of the present invention may be used to induce antibodies according to methods well known in the art including, but not limited to, in vivo immunization, in vitro immunization, and phage display methods. See, e.g., Sutcliffe et al., supra; Wilson et al., supra, and Bittle et al., J. Gen. Virol., 66:2347-2354 (1985). If in vivo immunization is used, animals may be immunized with free peptide; however, anti-peptide antibody titer may be boosted by coupling the peptide to a macromolecular carrier, such as keyhole limpet hemacyanin (KLH) or tetanus toxoid. For instance, peptides containing cysteine residues may be coupled to a carrier using a linker such as maleimidobenzoyl-N-hydroxysuccinimide ester (MBS), while other peptides may be coupled to carriers using a more general linking agent such as glutaraldehyde. Animals such as rabbits, rats and mice are immunized with either free or carrier-coupled peptides, for instance, by intraperitoneal and/or intradermal injection of emulsions containing about 100 μg of peptide or carrier protein and Freund's adjuvant or any other adjuvant known for stimulating an immune response. Several booster injections may be needed, for instance, at intervals of about two weeks, to provide a useful titer of anti-peptide antibody which can be detected, for example, by ELISA assay using free peptide adsorbed to a solid surface. The titer of anti-peptide antibodies in serum from an immunized animal may be increased by selection of anti-peptide antibodies, for instance, by adsorption to the peptide on a solid support and elution of the selected antibodies according to methods well known in the art.

[0162] As one of skill in the art will appreciate, and as discussed above, the polypeptides of the present invention (e.g., those comprising an immunogenic or antigenic epitope) can be fused to heterologous polypeptide sequences. For example, polypeptides of the present invention (including fragments or variants thereof), may be fused with the constant domain of immunoglobulins (IgA, IgE, IgG, IgM), or portions thereof (CH1, CH2, CH3, or any combination thereof and portions thereof, resulting in chimeric polypeptides. By way of another non-limiting example, polypeptides and/or antibodies of the present invention (including fragments or variants thereof) may be fused with albumin (including but not limited to recombinant human serum albumin or fragments or variants thereof (see, e.g., U.S. Pat. No. 5,876,969, issued Mar. 2, 1999, EP Patent 0 413 622, and U.S. Pat. No. 5,766,883, issued Jun. 16, 1998, herein incorporated by reference in their entirety)). In a preferred embodiment, polypeptides and/or antibodies of the present invention (including fragments or variants thereof) are fused with the mature form of human serum albumin (i.e., amino acids 1-585 of human serum albumin as shown in FIGS. 1 and 2 of EP Patent 0 322 094) which is herein incorporated by reference in its entirety. In another preferred embodiment, polypeptides and/or antibodies of the present invention (including fragments or variants thereof) are fused with polypeptide fragments comprising, or alternatively consisting of, amino acid residues 1-z of human serum albumin, where z is an integer from 369 to 419, as described in U.S. Pat. No. 5,766,883 herein incorporated by reference in its entirety. Polypeptides and/or antibodies of the present invention (including fragments or variants thereof) may be fused to either the N- or C-terminal end of the heterologous protein (e.g., immunoglobulin Fc polypeptide or human serum albumin polypeptide). Polynucleotides encoding fusion proteins of the invention are also encompassed by the invention.

[0163] Such fusion proteins as those described above may facilitate purification and may increase half-life in vivo. This has been shown for chimeric proteins consisting of the first two domains of the human CD4-polypeptide and various domains of the constant regions of the heavy or light chains of mammalian immunoglobulins. See, e.g., EP 394,827; Traunecker et al., Nature, 331:84-86 (1988). Enhanced delivery of an antigen across the epithelial barrier to the immune system has been demonstrated for antigens (e.g., insulin) conjugated to an FcRn binding partner such as IgG or Fc fragments (see, e.g., PCT Publications WO 96/22024 and WO 99/04813). IgG fusion proteins that have a disulfide-linked dimeric structure due to the IgG portion desulfide bonds have also been found to be more efficient in binding and neutralizing other molecules than monomeric polypeptides or fragments thereof alone. See, e.g., Fountoulakis et al., J. Biochem., 270:3958-3964 (1995). Nucleic acids encoding the above epitopes can also be recombined with a gene of interest as an epitope tag (e.g., the hemagglutinin (HA) tag or flag tag) to aid in detection and purification of the expressed polypeptide. For example, a system described by Janknecht et al. allows for the ready purification of non-denatured fusion proteins expressed in human cell lines (Janknecht et al., 1991, Proc. Natl. Acad. Sci. USA 88:8972-897). In this system, the gene of interest is subcloned into a vaccinia recombination plasmid such that the open reading frame of the gene is translationally fused to an amino-terminal tag consisting of six histidine residues. The tag serves as a matrix binding domain for the fusion protein. Extracts from cells infected with the recombinant vaccinia virus are loaded onto Ni2+ nitriloacetic acid-agarose column and histidine-tagged proteins can be selectively eluted with imidazole-containing buffers.

[0164] Fusion Proteins

[0165] Any polypeptide of the present invention can be used to generate fusion proteins. For example, the polypeptide of the present invention, when fused to a second protein, can be used as an antigenic tag. Antibodies raised against the polypeptide of the present invention can be used to indirectly detect the second protein by binding to the polypeptide. Moreover, because secreted proteins target cellular locations based on trafficking signals, polypeptides of the present invention which are shown to be secreted can be used as targeting molecules once fused to other proteins.

[0166] Examples of domains that can be fused to polypeptides of the present invention include not only heterologous signal sequences, but also other heterologous functional regions. The fusion does not necessarily need to be direct, but may occur through linker sequences.

[0167] In certain preferred embodiments, proteins of the invention are fusion proteins comprising an amino acid sequence that is an N and/or C-terminal deletion of a polypeptide of the invention. In preferred embodiments, the invention is directed to a fusion protein comprising an amino acid sequence that is at least 90%, 95%, 96%, 97%, 98% or 99% identical to a polypeptide sequence of the invention. Polynucleotides encoding these proteins are also encompassed by the invention.

[0168] Moreover, fusion proteins may also be engineered to improve characteristics of the polypeptide of the present invention. For instance, a region of additional amino acids, particularly charged amino acids, may be added to the N-terminus of the polypeptide to improve stability and persistence during purification from the host cell or subsequent handling and storage. Also, peptide moieties may be added to the polypeptide to facilitate purification. Such regions may be removed prior to final preparation of the polypeptide. The addition of peptide moieties to facilitate handling of polypeptides are familiar and routine techniques in the art.

[0169] As one of skill in the art will appreciate that, as discussed above, polypeptides of the present invention, and epitope-bearing fragments thereof, can be combined with heterologous polypeptide sequences. For example, the polypeptides of the present invention may be fused with heterologous polypeptide sequences, for example, the polypeptides of the present invention may be fused with the constant domain of immunoglobulins (IgA, IgE, IgG, IgM) or portions thereof (CH1, CH2, CH3, and any combination thereof, including both entire domains and portions thereof), or albumin (including, but not limited to, native or recombinant human albumin or fragments or variants thereof (see, e.g., U.S. Pat. No. 5,876,969, issued Mar. 2, 1999, EP Patent 0 413 622, and U.S. Pat. No. 5,766,883, issued Jun. 16, 1998, herein incorporated by reference in their entirety)), resulting in chimeric polypeptides. For example, EP-A-O 464 533 (Canadian counterpart 2045869) discloses fusion proteins comprising various portions of constant region of immunoglobulin molecules together with another human protein or part thereof. In many cases, the Fc part in a fusion protein is beneficial in therapy and diagnosis, and thus can result in, for example, improved pharmacokinetic properties (EP-A 0232 262). Alternatively, deleting the Fc part after the fusion protein has been expressed, detected, and purified, would be desired. For example, the Fc portion may hinder therapy and diagnosis if the fusion protein is used as an antigen for immunizations. In drug discovery, for example, human proteins, such as hIL-5, have been fused with Fc portions for the purpose of high-throughput screening assays to identify antagonists of hIL-5. See, D. Bennett et al., J. Molecular Recognition 8:52-58 (1995); K. Johanson et al., J. Biol. Chem. 270:9459-9471 (1995).

[0170] Moreover, the polypeptides of the present invention can be fused to marker sequences, such as a polypeptide which facilitates purification of the fused polypeptide. In preferred embodiments, the marker amino acid sequence is a hexa-histidine peptide, such as the tag provided in a pQE vector (QIAGEN, Inc., 9259 Eton Avenue, Chatsworth, Calif., 91311), among others, many of which are commercially available. As described in Gentz et al., Proc. Natl. Acad. Sci. USA 86:821-824 (1989), for instance, hexa-histidine provides for convenient purification of the fusion protein. Another peptide tag useful for purification, the “HA” tag, corresponds to an epitope derived from the influenza hemagglutinin protein (Wilson et al., Cell 37:767 (1984)).

[0171] Additional fusion proteins of the invention may be generated through the techniques of gene-shuffling, motif-shuffling, exon-shuffling, and/or codon-shuffling (collectively referred to as “DNA shuffling”). DNA shuffling may be employed to modulate the activities of polypeptides of the invention, such methods can be used to generate polypeptides with altered activity, as well as agonists and antagonists of the polypeptides. See, generally, U.S. Pat. Nos. 5,605,793; 5,811,238; 5,830,721; 5,834,252; and 5,837,458, and Patten et al., Curr. Opinion Biotechnol. 8:724-33 (1997); Harayama, Trends Biotechnol. 16(2):76-82 (1998); Hansson, et al., J. Mol. Biol. 287:265-76 (1999); and Lorenzo and Blasco, Biotechniques 24(2):308-13 (1998) (each of these patents and publications are hereby incorporated by reference in its entirety). In one embodiment, alteration of polynucleotides corresponding to SEQ ID NO:X and the polypeptides encoded by these polynucleotides may be achieved by DNA shuffling. DNA shuffling involves the assembly of two or more DNA segments by homologous or site-specific recombination to generate variation in the polynucleotide sequence. In another embodiment, polynucleotides of the invention, or the encoded polypeptides, may be altered by being subjected to random mutagenesis by error-prone PCR, random nucleotide insertion or other methods prior to recombination. In another embodiment, one or more components, motifs, sections, parts, domains, fragments, etc., of a polynucleotide encoding a polypeptide of the invention may be recombined with one or more components, motifs, sections, parts, domains, fragments, etc. of one or more heterologous molecules.

[0172] Thus, any of these above fusions can be engineered using the polynucleotides or the polypeptides of the present invention.

[0173] Recombinant and Synthetic Production of Polypeptides of the Invention

[0174] The present invention also relates to vectors containing the polynucleotide of the present invention, host cells, and the production of polypeptides by synthetic and recombinant techniques. The vector may be, for example, a phage, plasmid, viral, or retroviral vector. Retroviral vectors may be replication competent or replication defective. In the latter case, viral propagation generally will occur only in complementing host cells.

[0175] The polynucleotides of the invention may be joined to a vector containing a selectable marker for propagation in a host. Generally, a plasmid vector is introduced in a precipitate, such as a calcium phosphate precipitate, or in a complex with a charged lipid. If the vector is a virus, it may be packaged in vitro using an appropriate packaging cell line and then transduced into host cells.

[0176] The polynucleotide insert should be operatively linked to an appropriate promoter, such as the phage lambda PL promoter, the E. coli lac, trp, phoA and tac promoters, the SV40 early and late promoters and promoters of retroviral LTRs, to name a few. Other suitable promoters will be known to the skilled artisan. The expression constructs will further contain sites for transcription initiation, termination, and, in the transcribed region, a ribosome binding site for translation. The coding portion of the transcripts expressed by the constructs will preferably include a translation initiating codon at the beginning and a termination codon (UAA, UGA or UAG) appropriately positioned at the end of the polypeptide to be translated.

[0177] As indicated, the expression vectors will preferably include at least one selectable marker. Such markers include dihydrofolate reductase, G418, glutamine synthase, or neomycin resistance for eukaryotic cell culture, and tetracycline, kanamycin or ampicillin resistance genes for culturing in E. coli and other bacteria. Representative examples of appropriate hosts include, but are not limited to, bacterial cells, such as E. coli, Streptomyces and Salmonella typhimurium cells; fungal cells, such as yeast cells (e.g., Saccharomyces cerevisiae or Pichia pastoris (ATCC Accession No. 201178)); insect cells such as Drosophila S2 and Spodoptera Sf9 cells; animal cells such as CHO, COS, 293, and Bowes melanoma cells; and plant cells. Appropriate culture mediums and conditions for the above-described host cells are known in the art.

[0178] Among vectors preferred for use in bacteria include pQE70, pQE60 and pQE-9, available from QIAGEN, Inc.; pBluescript vectors, Phagescript vectors, pNH8A, pNH16a, pNH18A, pNH46A, available from Stratagene Cloning Systems, Inc.; and ptrc99a, pKK223-3, pKK233-3, pDR540, pRIT5 available from Pharmacia Biotech, Inc. Among preferred eukaryotic vectors are pWLNEO, pSV2CAT, pOG44, pXT1 and pSG available from Stratagene; and pSVK3, pBPV, pMSG and pSVL available from Pharmacia. Preferred expression vectors for use in yeast systems include, but are not limited to pYES2, pYD1, pTEF1/Zeo, pYES2/GS, pPICZ, pGAPZ, pGAPZalph, pPIC9, pPIC3.5, pHIL-D2, pHIL-S1, pPIC3.5K, pPIC9K, and PA0815 (all available from Invitrogen, Carlbad, Calif.). Other suitable vectors will be readily apparent to the skilled artisan.

[0179] Vectors which use glutamine synthase (GS) or DHFR as the selectable markers can be amplified in the presence of the drugs methionine sulphoximine or methotrexate, respectively. An advantage of glutamine synthase based vectors are the availabilty of cell lines (e.g., the murine myeloma cell line, NS0) which are glutamine synthase negative. Glutamine synthase expression systems can also function in glutamine synthase expressing cells (e.g., Chinese Hamster Ovary (CHO) cells) by providing additional inhibitor to prevent the functioning of the endogenous gene. A glutamine synthase expression system and components thereof are detailed in PCT publications: WO87/04462; WO86/05807; WO89/01036; WO89/10404; and WO91/06657, which are hereby incorporated in their entireties by reference herein. Additionally, glutamine synthase expression vectors can be obtained from Lonza Biologics, Inc. (Portsmouth, N.H.). Expression and production of monoclonal antibodies using a GS expression system in murine myeloma cells is described in Bebbington et al., Bio/technology 10:169(1992) and in Biblia and Robinson Biotechnol. Prog. 11:1 (1995) which are herein incorporated by reference.

[0180] The present invention also relates to host cells containing the above-described vector constructs described herein, and additionally encompasses host cells containing nucleotide sequences of the invention that are operably associated with one or more heterologous control regions (e.g., promoter and/or enhancer) using techniques known of in the art. The host cell can be a higher eukaryotic cell, such as a mammalian cell (e.g., a human derived cell), or a lower eukaryotic cell, such as a yeast cell, or the host cell can be a prokaryotic cell, such as a bacterial cell. A host strain may be chosen which modulates the expression of the inserted gene sequences, or modifies and processes the gene product in the specific fashion desired. Expression from certain promoters can be elevated in the presence of certain inducers; thus expression of the genetically engineered polypeptide may be controlled. Furthermore, different host cells have characteristics and specific mechanisms for the translational and post-translational processing and modification (e.g., phosphorylation, cleavage) of proteins. Appropriate cell lines can be chosen to ensure the desired modifications and processing of the foreign protein expressed.

[0181] Introduction of the nucleic acids and nucleic acid constructs of the invention into the host cell can be effected by calcium phosphate transfection, DEAE-dextran mediated transfection, cationic lipid-mediated transfection, electroporation, transduction, infection, or other methods. Such methods are described in many standard laboratory manuals, such as Davis et al., Basic Methods In Molecular Biology (1986). It is specifically contemplated that the polypeptides of the present invention may in fact be expressed by a host cell lacking a recombinant vector.

[0182] In addition to encompassing host cells containing the vector constructs discussed herein, the invention also encompasses primary, secondary, and immortalized host cells of vertebrate origin, particularly mammalian origin, that have been engineered to delete or replace endogenous genetic material (e.g., the coding sequence), and/or to include genetic material (e.g., heterologous polynucleotide sequences) that is operably associated with polynucleotides of the invention, and which activates, alters, and/or amplifies endogenous polynucleotides. For example, techniques known in the art may be used to operably associate heterologous control regions (e.g., promoter and/or enhancer) and endogenous polynucleotide sequences via homologous recombination (see, e.g., U.S. Pat. No. 5,641,670, issued Jun. 24, 1997; International Publication Number WO 96/29411; International Publication Number WO 94/12650; Koller et al., Proc. Natl. Acad. Sci. USA 86:8932-8935 (1989); and Zijlstra et al., Nature 342:435-438 (1989), the disclosures of each of which are incorporated by reference in their entireties).

[0183] Polypeptides of the invention can be recovered and purified from recombinant cell cultures by well-known methods including ammonium sulfate or ethanol precipitation, acid extraction, anion or cation exchange chromatography, phosphocellulose chromatography, hydrophobic interaction chromatography, affinity chromatography, hydroxylapatite chromatography and lectin chromatography. Most preferably, high performance liquid chromatography (“HPLC”) is employed for purification.

[0184] Polypeptides of the present invention can also be recovered from: products purified from natural sources, including bodily fluids, tissues and cells, whether directly isolated or cultured; products of chemical synthetic procedures; and products produced by recombinant techniques from a prokaryotic or eukaryotic host, including, for example, bacterial, yeast, higher plant, insect, and mammalian cells. Depending upon the host employed in a recombinant production procedure, the polypeptides of the present invention may be glycosylated or may be non-glycosylated. In addition, polypeptides of the invention may also include an initial modified methionine residue, in some cases as a result of host-mediated processes. Thus, it is well known in the art that the N-terminal methionine encoded by the translation initiation codon generally is removed with high efficiency from any protein after translation in all eukaryotic cells. While the N-terminal methionine on most proteins also is efficiently removed in most prokaryotes, for some proteins, this prokaryotic removal process is inefficient, depending on the nature of the amino acid to which the N-terminal methionine is covalently linked.

[0185] In one embodiment, the yeast Pichia pastoris is used to express polypeptides of the invention in a eukaryotic system. Pichia pastoris is a methylotrophic yeast which can metabolize methanol as its sole carbon source. A main step in the methanol metabolization pathway is the oxidation of methanol to formaldehyde using 2. This reaction is catalyzed by the enzyme alcohol oxidase. In order to metabolize methanol as its sole carbon source, Pichia pastoris must generate high levels of alcohol oxidase due, in part, to the relatively low affinity of alcohol oxidase for O₂. Consequently, in a growth medium depending on methanol as a main carbon source, the promoter region of one of the two alcohol oxidase genes (AOX1) is highly active. In the presence of methanol, alcohol oxidase produced from the AOX1 gene comprises up to approximately 30% of the total soluble protein in Pichia pastoris. See Ellis, S. B., et al., Mol. Cell. Biol. 5:1111-21 (1985); Koutz, P. J, et al., Yeast 5:167-77 (1989); Tschopp, J. F., et al., Nucl. Acids Res. 15:3859-76 (1987). Thus, a heterologous coding sequence, such as, for example, a polynucleotide of the present invention, under the transcriptional regulation of all or part of the AOX1 regulatory sequence is expressed at exceptionally high levels in Pichia yeast grown in the presence of methanol.

[0186] In one example, the plasmid vector pPIC9K is used to express DNA encoding a polypeptide of the invention, as set forth herein, in a Pichea yeast system essentially as described in “Pichia Protocols: Methods in Molecular Biology,” D. R. Higgins and J. Cregg, eds. The Humana Press, Totowa, N.J., 1998. This expression vector allows expression and secretion of a polypeptide of the invention by virtue of the strong AOX1 promoter linked to the Pichia pastoris alkaline phosphatase (PHO) secretory signal peptide (i.e., leader) located upstream of a multiple cloning site.

[0187] Many other yeast vectors could be used in place of pPIC9K, such as, pYES2, pYD1, pTEF1/Zeo, pYES2/GS, pPICZ, pGAPZ, pGAPZalpha, pPIC9, pPIC3.5, pHIL-D2, pHIL-S1, pPIC3.5K, and PA0815, as one skilled in the art would readily appreciate, as long as the proposed expression construct provides appropriately located signals for transcription, translation, secretion (if desired), and the like, including an in-frame AUG as required.

[0188] In another embodiment, high-level expression of a heterologous coding sequence, such as, for example, a polynucleotide of the present invention, may be achieved by cloning the heterologous polynucleotide of the invention into an expression vector such as, for example, pGAPZ or pGAPZalpha, and growing the yeast culture in the absence of methanol.

[0189] In addition to encompassing host cells containing the vector constructs discussed herein, the invention also encompasses primary, secondary, and immortalized host cells of vertebrate origin, particularly mammalian origin, that have been engineered to delete or replace endogenous genetic material (e.g., coding sequence), and/or to include genetic material (e.g., heterologous polynucleotide sequences) that is operably associated with polynucleotides of the invention, and which activates, alters, and/or amplifies endogenous polynucleotides. For example, techniques known in the art may be used to operably associate heterologous control regions (e.g., promoter and/or enhancer) and endogenous polynucleotide sequences via homologous recombination (see, e.g., U.S. Pat. No. 5,641,670, issued Jun. 24, 1997; International Publication No. WO 96/29411, published Sep. 26, 1996; International Publication No. WO 94/12650, published Aug. 4, 1994; Koller et al., Proc. Natl. Acad. Sci. USA 86:8932-8935 (1989); and Zijlstra et al., Nature 342:435-438 (1989), the disclosures of each of which are incorporated by reference in their entireties).

[0190] In addition, polypeptides of the invention can be chemically synthesized using techniques known in the art (e.g., see Creighton, 1983, Proteins: Structures and Molecular Principles, W. H. Freeman & Co., N.Y., and Hunkapiller et al., Nature, 310:105-111 (1984)). For example, a polypeptide corresponding to a fragment of a polypeptide can be synthesized by use of a peptide synthesizer. Furthermore, if desired, nonclassical amino acids or chemical amino acid analogs can be introduced as a substitution or addition into the polypeptide sequence. Non-classical amino acids include, but are not limited to, to the D-isomers of the common amino acids, 2,4-diaminobutyric acid, a-amino isobutyric acid, 4-aminobutyric acid, Abu, 2-amino butyric acid, g-Abu, e-Ahx, 6-amino hexanoic acid, Aib, 2-amino isobutyric acid, 3-amino propionic acid, ornithine, norleucine, norvaline, hydroxyproline, sarcosine, citrulline, homocitrulline, cysteic acid, t-butylglycine, t-butylalanine, phenylglycine, cyclohexylalanine, b-alanine, fluoro-amino acids, designer amino acids such as b-methyl amino acids, Ca-methyl amino acids, Na-methyl amino acids, and amino acid analogs in general. Furthermore, the amino acid can be D (dextrorotary) or L (levorotary).

[0191] The invention encompasses polypeptides of the present invention which are differentially modified during or after translation, e.g., by glycosylation, acetylation, phosphorylation, amidation, derivatization by known protecting/blocking groups, proteolytic cleavage, linkage to an antibody molecule or other cellular ligand, etc. Any of numerous chemical modifications may be carried out by known techniques, including but not limited, to specific chemical cleavage by cyanogen bromide, trypsin, chymotrypsin, papain, V8 protease, NaBH₄; acetylation, formylation, oxidation, reduction; metabolic synthesis in the presence of tunicamycin; etc.

[0192] Additional post-translational modifications encompassed by the invention include, for example, e.g., N-linked or O-linked carbohydrate chains, processing of N-terminal or C-terminal ends), attachment of chemical moieties to the amino acid backbone, chemical modifications of N-linked or O-linked carbohydrate chains, and addition or deletion of an N-terminal methionine residue as a result of procaryotic host cell expression. The polypeptides may also be modified with a detectable label, such as an enzymatic, fluorescent, isotopic or affinity label to allow for detection and isolation of the protein.

[0193] Examples of suitable enzymes include horseradish peroxidase, alkaline phosphatase, beta-galactosidase, or acetylcholinesterase; examples of suitable prosthetic group complexes include streptavidin/biotin and avidin/biotin; examples of suitable fluorescent materials include umbelliferone, fluorescein, fluorescein isothiocyanate, rhodamine, dichlorotriazinylamine fluorescein, dansyl chloride or phycoerythrin; an example of a luminescent material includes luminol; examples of bioluminescent materials include luciferase, luciferin, and acquorin; and examples of suitable radioactive material include iodine (¹²¹I, ¹²³I, ¹²⁵I, ¹³¹I), carbon (14C), sulfur (³⁵S), tritium (3H), indium (¹¹¹In, ¹¹²In, ¹¹³In, ^{115m}In), technetium (⁹⁹Tc, ^{99m}Tc), thallium (²⁰¹Ti), gallium (⁶⁸Ga, ⁶⁷Ga), palladium (¹⁰³Pd), molybdenum (⁹⁹Mo), xenon (¹³³Xe), fluorine (¹⁸F), ¹⁵³Sm, ¹⁷⁷Lu, ¹⁵⁹Gd, ¹⁴⁹Pm, ¹⁴⁰La, ¹⁷⁵Yb, ¹⁶⁶Ho, ⁹⁰Y, ⁴⁷Sc, ⁸⁶Re, ¹⁸⁸Re, ¹⁴²Pr, ¹⁰⁵Rh, and ⁹⁷Ru.

[0194] In specific embodiments, a polypeptide of the present invention or fragment or variant thereof is attached to macrocyclic chelators that associate with radiometal ions, including but not limited to, ¹⁷⁷Lu, ⁹⁰Y, ¹⁶⁶Ho, and ¹⁵³Sm, to polypeptides. In a preferred embodiment, the radiometal ion associated with the macrocyclic chelators is ¹¹¹In. In another preferred embodiment, the radiometal ion associated with the macrocyclic chelator is ⁹⁰Y. In specific embodiments, the macrocyclic chelator is 1,4,7,10-tetraazacyclododecane-N,N′,N″,N′″-tetraacetic acid (DOTA). In other specific embodiments, DOTA is attached to an antibody of the invention or fragment thereof via a linker molecule. Examples of linker molecules useful for conjugating DOTA to a polypeptide are commonly known in the art—see, for example, DeNardo et al., Clin Cancer Res. 4(10):2483-90 (1998); Peterson et al., Bioconjug. Chem. 10(4):553-7 (1999); and Zimmerman et al, Nucl. Med. Biol. 26(8):943-50 (1999); which are hereby incorporated by reference in their entirety.

[0195] As mentioned, the proteins of the invention may be modified by either natural processes, such as posttranslational processing, or by chemical modification techniques which are well known in the art. It will be appreciated that the same type of modification may be present in the same or varying degrees at several sites in a given polypeptide. Polypeptides of the invention may be branched, for example, as a result of ubiquitination, and they may be cyclic, with or without branching. Cyclic, branched, and branched cyclic polypeptides may result from posttranslation natural processes or may be made by synthetic methods. Modifications include acetylation, acylation, ADP-ribosylation, amidation, covalent attachment of flavin, covalent attachment of a heme moiety, covalent attachment of a nucleotide or nucleotide derivative, covalent attachment of a lipid or lipid derivative, covalent attachment of phosphotidylinositol, cross-linking, cyclization, disulfide bond formation, demethylation, formation of covalent cross-links, formation of cysteine, formation of pyroglutamate, formylation, gamma-carboxylation, glycosylation, GPI anchor formation, hydroxylation, iodination, methylation, myristoylation, oxidation, pegylation, proteolytic processing, phosphorylation, prenylation, racemization, selenoylation, sulfation, transfer-RNA mediated addition of amino acids to proteins such as arginylation, and ubiquitination. (See, for instance, PROTEINS—STRUCTURE AND MOLECULAR PROPERTIES, 2nd Ed., T. E. Creighton, W. H. Freeman and Company, New York (1993); POSTTRANSLATIONAL COVALENT MODIFICATION OF PROTEINS, B. C. Johnson, Ed., Academic Press, New York, pgs. 1-12 (1983); Seifter et al., Meth. Enzymol. 182:626-646 (1990); Rattan et al., Ann. N.Y. Acad. Sci. 663:48-62 (1992)).

[0196] Also provided by the invention are chemically modified derivatives of the polypeptides of the invention which may provide additional advantages such as increased solubility, stability and circulating time of the polypeptide, or decreased immunogenicity (see U.S. Pat. No. 4,179,337). The chemical moieties for derivitization may be selected from water soluble polymers such as polyethylene glycol, ethylene glycol/propylene glycol copolymers, carboxymethylcellulose, dextran, polyvinyl alcohol and the like. The polypeptides may be modified at random positions within the molecule, or at predetermined positions within the molecule and may include one, two, three or more attached chemical moieties.

[0197] The polymer may be of any molecular weight, and may be branched or unbranched. For polyethylene glycol, the preferred molecular weight is between about 1 kDa and about 100 kDa (the term “about” indicating that in preparations of polyethylene glycol, some molecules will weigh more, some less, than the stated molecular weight) for ease in handling and manufacturing. Other sizes may be used, depending on the desired therapeutic profile (e.g., the duration of sustained release desired, the effects, if any on biological activity, the ease in handling, the degree or lack of antigenicity and other known effects of the polyethylene glycol to a therapeutic protein or analog). For example, the polyethylene glycol may have an average molecular weight of about 200, 500, 1000, 1500, 2000, 2500, 3000, 3500, 4000, 4500, 5000, 5500, 6000, 6500, 7000, 7500, 8000, 8500, 9000, 9500, 10,000, 10,500, 11,000, 11,500, 12,000, 12,500, 13,000, 13,500, 14,000, 14,500, 15,000, 15,500, 16,000, 16,500, 17,000, 17,500, 18,000, 18,500, 19,000, 19,500, 20,000, 25,000, 30,000, 35,000, 40,000, 45,000, 50,000, 55,000, 60,000, 65,000, 70,000, 75,000, 80,000, 85,000, 90,000, 95,000, or 100,000 kDa.

[0198] As noted above, the polyethylene glycol may have a branched structure. Branched polyethylene glycols are described, for example, in U.S. Pat. No. 5,643,575; Morpurgo et al., Appl. Biochem. Biotechnol. 56:59-72 (1996); Vorobjev et al., Nucleosides Nucleotides 18:2745-2750 (1999); and Caliceti et al., Bioconjug. Chem. 10:638-646 (1999), the disclosures of each of which are incorporated herein by reference.

[0199] The polyethylene glycol molecules (or other chemical moieties) should be attached to the protein with consideration of effects on functional or antigenic domains of the protein. There are a number of attachment methods available to those skilled in the art, such as, for example, the method disclosed in EP 0 401 384 (coupling PEG to G-CSF), herein incorporated by reference; see also Malik et al., Exp. Hematol. 20:1028-1035 (1992), reporting pegylation of GM-CSF using tresyl chloride. For example, polyethylene glycol may be covalently bound through amino acid residues via a reactive group, such as a free amino or carboxyl group. Reactive groups are those to which an activated polyethylene glycol molecule may be bound. The amino acid residues having a free amino group may include lysine residues and the N-terminal amino acid residues; those having a free carboxyl group may include aspartic acid residues glutamic acid residues and the C-terminal amino acid residue. Sulfhydryl groups may also be used as a reactive group for attaching the polyethylene glycol molecules. Preferred for therapeutic purposes is attachment at an amino group, such as attachment at the N-terminus or lysine group.

[0200] As suggested above, polyethylene glycol may be attached to proteins via linkage to any of a number of amino acid residues. For example, polyethylene glycol can be linked to proteins via covalent bonds to lysine, histidine, aspartic acid, glutamic acid, or cysteine residues. One or more reaction chemistries may be employed to attach polyethylene glycol to specific amino acid residues (e.g., lysine, histidine, aspartic acid, glutamic acid, or cysteine) of the protein or to more than one type of amino acid residue (e.g., lysine, histidine, aspartic acid, glutamic acid, cysteine and combinations thereof of the protein.

[0201] One may specifically desire proteins chemically modified at the N-terminus. Using polyethylene glycol as an illustration of the present composition, one may select from a variety of polyethylene glycol molecules (by molecular weight, branching, etc.), the proportion of polyethylene glycol molecules to protein (polypeptide) molecules in the reaction mix, the type of pegylation reaction to be performed, and the method of obtaining the selected N-terminally pegylated protein. The method of obtaining the N-terminally pegylated preparation (i.e., separating this moiety from other monopegylated moieties if necessary) may be by purification of the N-terminally pegylated material from a population of pegylated protein molecules. Selective proteins chemically modified at the N-terminus modification may be accomplished by reductive alkylation which exploits differential reactivity of different types of primary amino groups (lysine versus the N-terminal) available for derivatization in a particular protein. Under the appropriate reaction conditions, substantially selective derivatization of the protein at the N-terminus with a carbonyl group containing polymer is achieved.

[0202] As indicated above, pegylation of the proteins of the invention may be accomplished by any number of means. For example, polyethylene glycol may be attached to the protein either directly or by an intervening linker. Linkerless systems for attaching polyethylene glycol to proteins are described in Delgado et al., Crit. Rev. Thera. Drug Carrier Sys. 9:249-304 (1992); Francis et al., Intern. J. of Hematol. 68:1-18 (1998); U.S. Pat. No. 4,002,531; U.S. Pat. No. 5,349,052; WO 95/06058; and WO 98/32466, the disclosures of each of which are incorporated herein by reference.

[0203] One system for attaching polyethylene glycol directly to amino acid residues of proteins without an intervening linker employs tresytated MPEG, which is produced by the modification of monmethoxy polyethylene glycol (MPEG) using tresylchloride (CISO₂CH₂CF₃). Upon reaction of protein with tresylated MPEG, polyethylene glycol is directly attached to amine groups of the protein. Thus, the invention includes protein-polyethylene glycol conjugates produced by reacting proteins of the invention with a polyethylene glycol molecule having a 2,2,2-trifluoreothane sulphonyl group.

[0204] Polyethylene glycol can also be attached to proteins using a number of different intervening linkers. For example, U.S. Pat. No. 5,612,460, the entire disclosure of which is incorporated herein by reference, discloses urethane linkers for connecting polyethylene glycol to proteins. Protein-polyethylene glycol conjugates wherein the polyethylene glycol is attached to the protein by a linker can also be produced by reaction of proteins with compounds such as MPEG-succinimidylsuccinate, MPEG activated with 1,1′-carbonyldiimidazole, MPEG-2,4,5-trichloropenylcarbonate, MPEG-p-nitrophenolcarbonate, and various MPEG-succinate derivatives. A number of additional polyethylene glycol derivatives and reaction chemistries for attaching polyethylene glycol to proteins are described in International Publication No. WO 98/32466, the entire disclosure of which is incorporated herein by reference. Pegylated protein products produced using the reaction chemistries set out herein are included within the scope of the Invention.

[0205] The number of polyethylene glycol moieties attached to each protein of the invention (i.e., the degree of substitution) may also vary. For example, the pegylated proteins of the invention may be linked, on average, to 1, 2, 3, 4, 5, 6, 7, 8, 9, 10, 12, 15, 17, 20, or more polyethylene glycol molecules. Similarly, the average degree of substitution within ranges such as 1-3,2-4, 3-5,4-6, 5-7,6-8, 7-9,8-10, 9-11, 10-12, 11-13, 12-14, 13-15, 14-16, 15-17, 16-18, 17-19, or 18-20 polyethylene glycol moieties per protein molecule. Methods for determining the degree of substitution are discussed, for example, in Delgado et al., Crit. Rev. Thera. Drug Carrier Sys. 9:249-304 (1992).

[0206] The polypeptides of the invention can be recovered and purified from chemical synthesis and recombinant cell cultures by standard methods which include, but are not limited to, ammonium sulfate or ethanol precipitation, acid extraction, anion or cation exchange chromatography, phosphocellulose chromatography, hydrophobic interaction chromatography, affinity chromatography, hydroxylapatite chromatography and lectin chromatography. Most preferably, high performance liquid chromatography (“HPLC”) is employed for purification. Well known techniques for refolding protein may be employed to regenerate active conformation when the polypeptide is denatured during isolation and/or purification.

[0207] The polypeptides of the invention may be in monomers or multimers (i.e., dimers, trimers, tetramers and higher multimers). Accordingly, the present invention relates to monomers and multimers of the polypeptides of the invention, their preparation, and compositions (preferably, Therapeutics) containing them. In specific embodiments, the polypeptides of the invention are monomers, dimers, trimers or tetramers. In additional embodiments, the multimers of the invention are at least dimers, at least trimers, or at least tetramers.

[0208] Multimers encompassed by the invention may be homomers or heteromers. As used herein, the term homomer refers to a multimer containing only polypeptides corresponding to a protein of the invention (e.g., the amino acid sequence of SEQ ID NO:Y, an amino acid sequence encoded by SEQ ID NO:X or the complement of SEQ ID NO:X, the amino acid sequence encoded by the portion of SEQ ID NO:X as defined in columns 8 and 9 of Table 2, and/or an amino acid sequence encoded by cDNA contained in Clone ID NO:Z (including fragments, variants, splice variants, and fusion proteins, corresponding to these as described herein)). These homomers may contain polypeptides having identical or different amino acid sequences. In a specific embodiment, a homomer of the invention is a multimer containing only polypeptides having an identical amino acid sequence. In another specific embodiment, a homomer of the invention is a multimer containing polypeptides having different amino acid sequences. In specific embodiments, the multimer of the invention is a homodimer (e.g., containing two polypeptides having identical or different amino acid sequences) or a homotrimer (e.g., containing three polypeptides having identical and/or different amino acid sequences). In additional embodiments, the homomeric multimer of the invention is at least a homodimer, at least a homotrimer, or at least a homotetramer.

[0209] As used herein, the term heteromer refers to a multimer containing one or more heterologous polypeptides (i.e., polypeptides of different proteins) in addition to the polypeptides of the invention. In a specific embodiment, the multimer of the invention is a heterodimer, a heterotrimer, or a heterotetramer. In additional embodiments, the heteromeric multimer of the invention is at least a heterodimer, at least a heterotrimer, or at least a heterotetramer.

[0210] Multimers of the invention may be the result of hydrophobic, hydrophilic, ionic and/or covalent associations and/or may be indirectly linked by, for example, liposome formation. Thus, in one embodiment, multimers of the invention, such as, for example, homodimers or homotrimers, are formed when polypeptides of the invention contact one another in solution. In another embodiment, heteromultimers of the invention, such as, for example, heterotrimers or heterotetramers, are formed when polypeptides of the invention contact antibodies to the polypeptides of the invention (including antibodies to the heterologous polypeptide sequence in a fusion protein of the invention) in solution. In other embodiments, multimers of the invention are formed by covalent associations with and/or between the polypeptides of the invention. Such covalent associations may involve one or more amino acid residues contained in the polypeptide sequence (e.g., that recited in SEQ ID NO:Y, encoded by the portion of SEQ ID NO:X as defined in columns 8 and 9 of Table 2, and/or encoded by the cDNA contained in Clone ID NO:Z). In one instance, the covalent associations are cross-linking between cysteine residues located within the polypeptide sequences which interact in the native (i.e., naturally occurring) polypeptide. In another instance, the covalent associations are the consequence of chemical or recombinant manipulation. Alternatively, such covalent associations may involve one or more amino acid residues contained in the heterologous polypeptide sequence in a fusion protein. In one example, covalent associations are between the heterologous sequence contained in a fusion protein of the invention (see, e.g., U.S. Pat. No. 5,478,925). In a specific example, the covalent associations are between the heterologous sequence contained in a Fc fusion protein of the invention (as described herein). In another specific example, covalent associations of fusion proteins of the invention are between heterologous polypeptide sequence from another protein that is capable of forming covalently associated multimers, such as for example, osteoprotegerin (see, e.g., International Publication NO: WO 98/49305, the contents of which are herein incorporated by reference in its entirety). In another embodiment, two or more polypeptides of the invention are joined through peptide linkers. Examples include those peptide linkers described in U.S. Pat. No. 5,073,627 (hereby incorporated by reference). Proteins comprising multiple polypeptides of the invention separated by peptide linkers may be produced using conventional recombinant DNA technology.

[0211] Another method for preparing multimer polypeptides of the invention involves use of polypeptides of the invention fused to a leucine zipper or isoleucine zipper polypeptide sequence. Leucine zipper and isoleucine zipper domains are polypeptides that promote multimerization of the proteins in which they are found. Leucine zippers were originally identified in several DNA-binding proteins (Landschulz et al., Science 240:1759, (1988)), and have since been found in a variety of different proteins. Among the known leucine zippers are naturally occurring peptides and derivatives thereof that dimerize or trimerize. Examples of leucine zipper domains suitable for producing soluble multimeric proteins of the invention are those described in PCT application WO 94/10308, hereby incorporated by reference. Recombinant fusion proteins comprising a polypeptide of the invention fused to a polypeptide sequence that dimerizes or trimerizes in solution are expressed in suitable host cells, and the resulting soluble multimeric fusion protein is recovered from the culture supernatant using techniques known in the art.

[0212] Trimeric polypeptides of the invention may offer the advantage of enhanced biological activity. Preferred leucine zipper moieties and isoleucine moieties are those that preferentially form trimers. One example is a leucine zipper derived from lung surfactant protein D (SPD), as described in Hoppe et al. (FEBS Letters 344:191, (1994)) and in U.S. patent application Ser. No. 08/446,922, hereby incorporated by reference. Other peptides derived from naturally occurring trimeric proteins may be employed in preparing trimeric polypeptides of the invention.

[0213] In another example, proteins of the invention are associated by interactions between Flag®(polypeptide sequence contained in fusion proteins of the invention containing Flag® polypeptide sequence. In a further embodiment, proteins of the invention are associated by interactions between heterologous polypeptide sequence contained in Flag®(fusion proteins of the invention and anti-Flag®(antibody.

[0214] The multimers of the invention may be generated using chemical techniques known in the art. For example, polypeptides desired to be contained in the multimers of the invention may be chemically cross-linked using linker molecules and linker molecule length optimization techniques known in the art (see, e.g., U.S. Pat. No. 5,478,925, which is herein incorporated by reference in its entirety). Additionally, multimers of the invention may be generated using techniques known in the art to form one or more inter-molecule cross-links between the cysteine residues located within the sequence of the polypeptides desired to be contained in the multimer (see, e.g., U.S. Pat. No. 5,478,925, which is herein incorporated by reference in its entirety). Further, polypeptides of the invention may be routinely modified by the addition of cysteine or biotin to the C-terminus or N-terminus of the polypeptide and techniques known in the art may be applied to generate multimers containing one or more of these modified polypeptides (see, e.g., U.S. Pat. No. 5,478,925, which is herein incorporated by reference in its entirety). Additionally, techniques known in the art may be applied to generate liposomes containing the polypeptide components desired to be contained in the multimer of the invention (see, e.g., U.S. Pat. No. 5,478,925, which is herein incorporated by reference in its entirety).

[0215] Alternatively, multimers of the invention may be generated using genetic engineering techniques known in the art. In one embodiment, polypeptides contained in multimers of the invention are produced recombinantly using fusion protein technology described herein or otherwise known in the art (see, e.g., U.S. Pat. No. 5,478,925, which is herein incorporated by reference in its entirety). In a specific embodiment, polynucleotides coding for a homodimer of the invention are generated by ligating a polynucleotide sequence encoding a polypeptide of the invention to a sequence encoding a linker polypeptide and then further to a synthetic polynucleotide encoding the translated product of the polypeptide in the reverse orientation from the original C-terminus to the N-terminus (lacking the leader sequence) (see, e.g., U.S. Pat. No. 5,478,925, which is herein incorporated by reference in its entirety). In another embodiment, recombinant techniques described herein or otherwise known in the art are applied to generate recombinant polypeptides of the invention which contain a transmembrane domain (or hydrophobic or signal peptide) and which can be incorporated by membrane reconstitution techniques into liposomes (see, e.g., U.S. Pat. No. 5,478,925, which is herein incorporated by reference in its entirety).

[0216] Antibodies

[0217] Further polypeptides of the invention relate to antibodies and T-cell antigen receptors (TCR) which immunospecifically bind a polypeptide, polypeptide fragment, or variant of the invention (e.g., a polypeptide or fragment or variant of the amino acid sequence of SEQ ID NO:Y or a polypeptide encoded by the cDNA contained in Clone ID No:Z, and/or an epitope, of the present invention) as determined by immunoassays well known in the art for assaying specific antibody-antigen binding. Antibodies of the invention include, but are not limited to, polyclonal, monoclonal, multispecific, human, humanized or chimeric antibodies, single chain antibodies, Fab fragments, F(ab′) fragments, fragments produced by a Fab expression library, anti-idiotypic (anti-Id) antibodies (including, e.g., anti-Id antibodies to antibodies of the invention), intracellularly-made antibodies (i.e., intrabodies), and epitope-binding fragments of any of the above. The term “antibody,” as used herein, refers to immunoglobulin molecules and immunologically active portions of immunoglobulin molecules, i.e., molecules that contain an antigen binding site that immunospecifically binds an antigen. The immunoglobulin molecules of the invention can be of any type (e.g., IgG, IgE, IgM, IgD, IgA and IgY), class (e.g., IgG1, IgG2, IgG3, IgG4, IgA1 and IgA2) or subclass of immunoglobulin molecule. In preferred embodiments, the immunoglobulin molecules of the invention are IgG1. In other preferred embodiments, the immunoglobulin molecules of the invention are IgG4.

[0218] Most preferably the antibodies are human antigen-binding antibody fragments of the present invention and include, but are not limited to, Fab, Fab′ and F(ab′)₂, Fd, single-chain Fvs (scFv), single-chain antibodies, disulfide-linked Fvs (sdFv) and fragments comprising either a VL or VH domain. Antigen-binding antibody fragments, including single-chain antibodies, may comprise the variable region(s) alone or in combination with the entirety or a portion of the following: hinge region, CH1, CH2, and CH3 domains. Also included in the invention are antigen-binding fragments also comprising any combination of variable region(s) with a hinge region, CH1, CH2, and CH3 domains. The antibodies of the invention may be from any animal origin including birds and mammals. Preferably, the antibodies are human, murine (e.g., mouse and rat), donkey, ship rabbit, goat, guinea pig, camel, horse, or chicken. As used herein, “human” antibodies include antibodies having the amino acid sequence of a human immunoglobulin and include antibodies isolated from human immunoglobulin libraries or from animals transgenic for one or more human immunoglobulin and that do not express endogenous immunoglobulins, as described infra and, for example in, U.S. Pat. No. 5,939,598 by Kucherlapati et al.

[0219] The antibodies of the present invention may be monospecific, bispecific, trispecific or of greater multispecificity. Multispecific antibodies may be specific for different epitopes of a polypeptide of the present invention or may be specific for both a polypeptide of the present invention as well as for a heterologous epitope, such as a heterologous polypeptide or solid support material. See, e.g., PCT publications WO 93/17715; WO 92/08802; WO 91/00360; WO 92/05793; Tutt, et al., J. Immunol. 147:60-69 (1991); U.S. Pat. Nos. 4,474,893; 4,714,681; 4,925,648; 5,573,920; 5,601,819; Kostelny et al., J. Immunol. 148:1547-1553 (1992).

[0220] Antibodies of the present invention may be described or specified in terms of the epitope(s) or portion(s) of a polypeptide of the present invention which they recognize or specifically bind. The epitope(s) or polypeptide portion(s) may be specified as described herein, e.g., by N-terminal and C-terminal positions, or by size in contiguous amino acid residues, or listed in the Tables and Figures. Preferred epitopes of the invention include the predicted epitopes shown in column 7 of Table 1A, as well as polynucleotides that encode these epitopes. Antibodies which specifically bind any epitope or polypeptide of the present invention may also be excluded. Therefore, the present invention includes antibodies that specifically bind polypeptides of the present invention, and allows for the exclusion of the same.

[0221] Antibodies of the present invention may also be described or specified in terms of their cross-reactivity. Antibodies that do not bind any other analog, ortholog, or homolog of a polypeptide of the present invention are included. Antibodies that bind polypeptides with at least 95%, at least 90%, at least 85%, at least 80%, at least 75%, at least 70%, at least 65%, at least 60%, at least 55%, and at least 50% identity (as calculated using methods known in the art and described herein) to a polypeptide of the present invention are also included in the present invention. In specific embodiments, antibodies of the present invention cross-react with murine, rat and/or rabbit homologs of human proteins and the corresponding epitopes thereof. Antibodies that do not bind polypeptides with less than 95%, less than 90%, less than 85%, less than 80%, less than 75%, less than 70%, less than 65%, less than 60%, less than 55%, and less than 50% identity (as calculated using methods known in the art and described herein) to a polypeptide of the present invention are also included in the present invention. In a specific embodiment, the above-described cross-reactivity is with respect to any single specific antigenic or immunogenic polypeptide, or combination(s) of 2, 3, 4, 5, or more of the specific antigenic and/or immunogenic polypeptides disclosed herein. Further included in the present invention are antibodies which bind polypeptides encoded by polynucleotides which hybridize to a polynucleotide of the present invention under stringent hybridization conditions (as described herein). Antibodies of the present invention may also be described or specified in terms of their binding affinity to a polypeptide of the invention. Preferred binding affinities include those with a dissociation constant or Kd less than 5×10⁻² M, 10⁻² M, 5×10⁻³ M, 10⁻³ M, 5×10⁻⁴ M, 10⁻⁴ M, 5×10⁻⁵ M, 10⁻⁵ M, 5×10⁻⁶ M, 10⁻⁶M, 5×10⁻⁷ M, 10⁷ M, 5×10⁻⁸ M, 10⁻⁸ M, 5×10⁻⁹ M, 10⁻⁹ M, 5×10⁻¹⁰ M, 10⁻¹⁰ M, 5×10⁻¹¹ M, 10⁻¹¹ M, 5×10⁻¹² M, 10⁻¹² M, 5×10⁻¹³ M, 10⁻¹³ M, 5×10⁻¹⁴ M, 10⁻¹⁴ M, 5×10⁻¹⁵ M, or 10⁻¹⁵ M.

[0222] The invention also provides antibodies that competitively inhibit binding of an antibody to an epitope of the invention as determined by any method known in the art for determining competitive binding, for example, the immunoassays described herein. In preferred embodiments, the antibody competitively inhibits binding to the epitope by at least 95%, at least 90%, at least 85%, at least 80%, at least 75%, at least 70%, at least 60%, or at least 50%.

[0223] Antibodies of the present invention may act as agonists or antagonists of the polypeptides of the present invention. For example, the present invention includes antibodies which disrupt the receptor/ligand interactions with the polypeptides of the invention either partially or fully. Preferably, antibodies of the present invention bind an antigenic epitope disclosed herein, or a portion thereof. The invention features both receptor-specific antibodies and ligand-specific antibodies. The invention also features receptor-specific antibodies which do not prevent ligand binding but prevent receptor activation. Receptor activation (i.e., signaling) may be determined by techniques described herein or otherwise known in the art. For example, receptor activation can be determined by detecting the phosphorylation (e.g., tyrosine or serine/threonine) of the receptor or its substrate by immunoprecipitation followed by western blot analysis (for example, as described supra). In specific embodiments, antibodies are provided that inhibit ligand activity or receptor activity by at least 95%, at least 90%, at least 85%, at least 80%, at least 75%, at least 70%, at least 60%, or at least 50% of the activity in absence of the antibody.

[0224] The invention also features receptor-specific antibodies which both prevent ligand binding and receptor activation as well as antibodies that recognize the receptor-ligand complex, and, preferably, do not specifically recognize the unbound receptor or the unbound ligand. Likewise, included in the invention are neutralizing antibodies which bind the ligand and prevent binding of the ligand to the receptor, as well as antibodies which bind the ligand, thereby preventing receptor activation, but do not prevent the ligand from binding the receptor. Further included in the invention are antibodies which activate the receptor. These antibodies may act as receptor agonists, i.e., potentiate or activate either all or a subset of the biological activities of the ligand-mediated receptor activation, for example, by inducing dimerization of the receptor. The antibodies may be specified as agonists, antagonists or inverse agonists for biological activities comprising the specific biological activities of the peptides of the invention disclosed herein. The above antibody agonists can be made using methods known in the art. See, e.g., PCT publication WO 96/40281; U.S. Pat. No. 5,811,097; Deng et al., Blood 92(6):1981-1988 (1998); Chen et al., Cancer Res. 58(16):3668-3678 (1998); Harrop et al., J. Immunol. 161(4):1786-1794 (1998); Zhu et al., Cancer Res. 58(15):3209-3214 (1998); Yoon et al., J. Immunol. 160(7):3170-3179 (1998); Prat et al., J. Cell. Sci. 111(Pt2):237-247 (1998); Pitard et al., J. Immunol. Methods 205(2):177-190 (1997); Liautard et al., Cytokine 9(4):233-241 (1997); Carlson et al., J. Biol. Chem. 272(17):11295-11301 (1997); Taryman et al., Neuron 14(4):755-762 (1995); Muller et al., Structure 6(9):1153-1167 (1998); Bartunek et al., Cytokine 8(1):14-20 (1996) (which are all incorporated by reference herein in their entireties).

[0225] Antibodies of the present invention may be used, for example, to purify, detect, and target the polypeptides of the present invention, including both in vitro and in vivo diagnostic and therapeutic methods. For example, the antibodies have utility in immunoassays for qualitatively and quantitatively measuring levels of the polypeptides of the present invention in biological samples. See, e.g., Harlow et al., Antibodies: A Laboratory Manual, (Cold Spring Harbor Laboratory Press, 2nd ed. 1988); incorporated by reference herein in its entirety.

[0226] As discussed in more detail below, the antibodies of the present invention may be used either alone or in combination with other compositions. The antibodies may further be recombinantly fused to a heterologous polypeptide at the N- or C-terminus or chemically conjugated (including covalent and non-covalent conjugations) to polypeptides or other compositions. For example, antibodies of the present invention may be recombinantly fused or conjugated to molecules useful as labels in detection assays and effector molecules such as heterologous polypeptides, drugs, radionuclides, or toxins. See, e.g., PCT publications WO 92/08495; WO 91/14438; WO 89/12624; U.S. Pat. No. 5,314,995; and EP 396,387; the disclosures of which are incorporated herein by reference in their entireties.

[0227] The antibodies of the invention include derivatives that are modified, i.e, by the covalent attachment of any type of molecule to the antibody such that covalent attachment does not prevent the antibody from generating an anti-idiotypic response. For example, but not by way of limitation, the antibody derivatives include antibodies that have been modified, e.g., by glycosylation, acetylation, pegylation, phosphylation, amidation, derivatization by known protecting/blocking groups, proteolytic cleavage, linkage to a cellular ligand or other protein, etc. Any of numerous chemical modifications may be carried out by known techniques, including, but not limited to specific chemical cleavage, acetylation, formylation, metabolic synthesis of tunicamycin, etc. Additionally, the derivative may contain one or more non-classical amino acids.

[0228] The antibodies of the present invention may be generated by any suitable method known in the art. Polyclonal antibodies to an antigen-of-interest can be produced by various procedures well known in the art. For example, a polypeptide of the invention can be administered to various host animals including, but not limited to, rabbits, mice, rats, etc. to induce the production of sera containing polyclonal antibodies specific for the antigen. Various adjuvants may be used to increase the immunological response, depending on the host species, and include but are not limited to, Freund's (complete and incomplete), mineral gels such as aluminum hydroxide, surface active substances such as lysolecithin, pluronic polyols, polyanions, peptides, oil emulsions, keyhole limpet hemocyanins, dinitrophenol, and potentially useful human adjuvants such as BCG (bacille Calmette-Guerin) and corynebacterium parvum. Such adjuvants are also well known in the art.

[0229] Monoclonal antibodies can be prepared using a wide variety of techniques known in the art including the use of hybridoma, recombinant, and phage display technologies, or a combination thereof. For example, monoclonal antibodies can be produced using hybridoma techniques including those known in the art and taught, for example, in Harlow et al., Antibodies: A Laboratory Manual, (Cold Spring Harbor Laboratory Press, 2nd ed. 1988); Hammerling, et al., in: Monoclonal Antibodies and T-Cell Hybridomas 563-681 (Elsevier, N.Y., 1981) (said references incorporated by reference in their entireties). The term “monoclonal antibody” as used herein is not limited to antibodies produced through hybridoma technology. The term “monoclonal antibody” refers to an antibody that is derived from a single clone, including any eukaryotic, prokaryotic, or phage clone, and not the method by which it is produced.

[0230] Methods for producing and screening for specific antibodies using hybridoma technology are routine and well known in the art and are discussed in detail in the Examples. In a non-limiting example, mice can be immunized with a polypeptide of the invention or a cell expressing such peptide. Once an immune response is detected, e.g., antibodies specific for the antigen are detected in the mouse serum, the mouse spleen is harvested and splenocytes isolated. The splenocytes are then fused by well known techniques to any suitable myeloma cells, for example cells from cell line SP20 available from the ATCC. Hybridomas are selected and cloned by limited dilution. The hybridoma clones are then assayed by methods known in the art for cells that secrete antibodies capable of binding a polypeptide of the invention. Ascites fluid, which generally contains high levels of antibodies, can be generated by immunizing mice with positive hybridoma clones.

[0231] Accordingly, the present invention provides methods of generating monoclonal antibodies as well as antibodies produced by the method comprising culturing a hybridoma cell secreting an antibody of the invention wherein, preferably, the hybridoma is generated by fusing splenocytes isolated from a mouse immunized with an antigen of the invention with myeloma cells and then screening the hybridomas resulting from the fusion for hybridoma clones that secrete an antibody able to bind a polypeptide of the invention.

[0232] Another well known method for producing both polyclonal and monoclonal human B cell lines is transformation using Epstein Barr Virus (EBV). Protocols for generating EBV-transformed B cell lines are commonly known in the art, such as, for example, the protocol outlined in Chapter 7.22 of Current Protocols in Immunology, Coligan et al., Eds., 1994, John Wiley & Sons, NY, which is hereby incorporated in its entirety by reference. The source of B cells for transformation is commonly human peripheral blood, but B cells for transformation may also be derived from other sources including, but not limited to, lymph nodes, tonsil, spleen, tumor tissue, and infected tissues. Tissues are generally made into single cell suspensions prior to EBV transformation. Additionally, steps may be taken to either physically remove or inactivate T cells (e.g., by treatment with cyclosporin A) in B cell-containing samples, because T cells from individuals seropositive for anti-EBV antibodies can suppress B cell immortalization by EBV.

[0233] In general, the sample containing human B cells is innoculated with EBV, and cultured for 3-4 weeks. A typical source of EBV is the culture supernatant of the B95-8 cell line (ATCC #VR-1492). Physical signs of EBV transformation can generally be seen towards the end of the 3-4 week culture period. By phase-contrast microscopy, transformed cells may appear large, clear, hairy and tend to aggregate in tight clusters of cells. Initially, EBV lines are generally polyclonal. However, over prolonged periods of cell cultures, EBV lines may become monoclonal or polyclonal as a result of the selective outgrowth of particular B cell clones. Alternatively, polyclonal EBV transformed lines may be subcloned (e.g., by limiting dilution culture) or fused with a suitable fusion partner and plated at limiting dilution to obtain monoclonal B cell lines. Suitable fusion partners for EBV transformed cell lines include mouse myeloma cell lines (e.g., SP2/0, X63-Ag8.653), heteromyeloma cell lines (human x mouse; e.g, SPAM-8, SBC-H20, and CB-F7), and human cell lines (e.g., GM 1500, SKO-007, RPMI 8226, and KR-4). Thus, the present invention also provides a method of generating polyclonal or monoclonal human antibodies against polypeptides of the invention or fragments thereof, comprising EBV-transformation of human B cells.

[0234] Antibody fragments which recognize specific epitopes may be generated by known techniques. For example, Fab and F(ab′)₂ fragments of the invention may be produced by proteolytic cleavage of immunoglobulin molecules, using enzymes such as papain (to produce Fab fragments) or pepsin (to produce F(ab′)₂ fragments). F(ab′)₂ fragments contain the variable region, the light chain constant region and the CH1 domain of the heavy chain.

[0235] For example, the antibodies of the present invention can also, be generated using various phage display methods known in the art. In phage display methods, functional antibody domains are displayed on the surface of phage particles which carry the polynucleotide sequences encoding them. In a particular embodiment, such phage can be utilized to display antigen binding domains expressed from a repertoire or combinatorial antibody library (e.g., human or murine). Phage expressing an antigen binding domain that binds the antigen of interest can be selected or identified with antigen, e.g., using labeled antigen or antigen bound or captured to a solid surface or bead. Phage used in these methods are typically filamentous phage including fd and M13 binding domains expressed from phage with Fab, Fv or disulfide stabilized Fv antibody domains recombinantly fused to either the phage gene III or gene VIII protein. Examples of phage display methods that can be used to make the antibodies of the present invention include those disclosed in Brinkman et al., J. Immunol. Methods 182:41-50 (1995); Ames et al., J. Immunol. Methods 184:177-186 (1995); Kettleborough et al., Eur. J. Immunol. 24:952-958 (1994); Persic et al., Gene 187 9-18 (1997); Burton et al., Advances in Immunology 57:191-280 (1994); PCT application No. PCT/GB91/01134; PCT publications WO 90/02809; WO 91/10737; WO 92/01047; WO 92/18619; WO 93/11236; WO 95/15982; WO 95/20401; and U.S. Pat. Nos. 5,698,426; 5,223,409; 5,403,484; 5,580,717; 5,427,908; 5,750,753; 5,821,047; 5,571,698; 5,427,908; 5,516,637; 5,780,225; 5,658,727; 5,733,743 and 5,969,108; each of which is incorporated herein by reference in its entirety.

[0236] As described in the above references, after phage selection, the antibody coding regions from the phage can be isolated and used to generate whole antibodies, including human antibodies, or any other desired antigen binding fragment, and expressed in any desired host, including mammalian cells, insect cells, plant cells, yeast, and bacteria, e.g., as described in detail below. For example, techniques to recombinantly produce Fab, Fab′ and F(ab′)₂ fragments can also be employed using methods known in the art such as those disclosed in PCT publication WO 92/22324; Mullinax et al., BioTechniques 12(6):864-869 (1992); and Sawai et al., AJRI 34:26-34 (1995); and Better et al., Science 240:1041-1043 (1988) (said references incorporated by reference in their entireties).

[0237] Examples of techniques which can be used to produce single-chain Fvs and antibodies include those described in U.S. Pat. Nos. 4,946,778 and 5,258,498; Huston et al., Methods in Enzymology 203:46-88 (1991); Shu et al., PNAS 90:7995-7999 (1993); and Skerra et al., Science 240:1038-1040 (1988). For some uses, including in vivo use of antibodies in humans and in vitro detection assays, it may be preferable to use chimeric, humanized, or human antibodies. A chimeric antibody is a molecule in which different portions of the antibody are derived from different animal species, such as antibodies having a variable region derived from a murine monoclonal antibody and a human immunoglobulin constant region. Methods for producing chimeric antibodies are known in the art. See e.g., Morrison, Science 229:1202 (1985); Oi et al., BioTechniques 4:214 (1986); Gillies et al., (1989) J. Immunol. Methods 125:191-202; U.S. Pat. Nos. 5,807,715; 4,816,567; and 4,816397, which are incorporated herein by reference in their entirety. Humanized antibodies are antibody molecules from non-human species antibody that binds the desired antigen having one or more complementarity determining regions (CDRs) from the non-human species and a framework regions from a human immunoglobulin molecule. Often, framework residues in the human framework regions will be substituted with the corresponding residue from the CDR donor antibody to alter, preferably improve, antigen binding. These framework substitutions are identified by methods well known in the art, e.g., by modeling of the interactions of the CDR and framework residues to identify framework residues important for antigen binding and sequence comparison to identify unusual framework residues at particular positions. (See, e.g., Queen et al., U.S. Pat. No. 5,585,089; Riechmann et al., Nature 332:323 (1988), which are incorporated herein by reference in their entireties.) Antibodies can be humanized using a variety of techniques known in the art including, for example, CDR-grafting (EP 239,400; PCT publication WO 91/09967; U.S. Pat. Nos. 5,225,539; 5,530,101; and 5,585,089), veneering or resurfacing (EP 592,106; EP 519,596; Padlan, Molecular Immunology 28(4/5):489-498 (1991); Studnicka et al., Protein Engineering 7(6):805-814 (1994); Roguska. et al., PNAS 91:969-973 (1994)), and chain shuffling (U.S. Pat. No. 5,565,332).

[0238] Completely human antibodies are particularly desirable for therapeutic treatment of human patients. Human antibodies can be made by a variety of methods known in the art including phage display methods described above using antibody libraries derived from human immunoglobulin sequences. See also, U.S. Pat. Nos. 4,444,887 and 4,716,111; and PCT publications WO 98/46645, WO 98/50433, WO 98/24893, WO 98/16654, WO 96/34096, WO 96/33735, and WO 91/10741; each of which is incorporated herein by reference in its entirety.

[0239] Human antibodies can also be produced using transgenic mice which are incapable of expressing functional endogenous immunoglobulins, but which can express human immunoglobulin genes. For example, the human heavy and light chain immunoglobulin gene complexes may be introduced randomly or by homologous recombination into mouse embryonic stem cells. Alternatively, the human variable region, constant region, and diversity region may be introduced into mouse embryonic stem cells in addition to the human heavy and light chain genes. The mouse heavy and light chain immunoglobulin genes may be rendered non-functional separately or simultaneously with the introduction of human immunoglobulin loci by homologous recombination. In particular, homozygous deletion of the JH region prevents endogenous antibody production. The modified embryonic stem cells are expanded and microinjected into blastocysts to produce chimeric mice. The chimeric mice are then bred to produce homozygous offspring which express human antibodies. The transgenic mice are immunized in the normal fashion with a selected antigen, e.g., all or a portion of a polypeptide of the invention. Monoclonal antibodies directed against the antigen can be obtained from the immunized, transgenic mice using conventional hybridoma technology. The human immunoglobulin transgenes harbored by the transgenic mice rearrange during B cell differentiation, and subsequently undergo class switching and somatic mutation. Thus, using such a technique, it is possible to produce therapeutically useful IgG, IgA, IgM and IgE antibodies. For an overview of this technology for producing human antibodies, see Lonberg and Huszar, Int. Rev. Immunol. 13:65-93 (1995). For a detailed discussion of this technology for producing human antibodies and human monoclonal antibodies and protocols for producing such antibodies, see, e.g., PCT publications WO 98/24893; WO 92/01047; WO 96/34096; WO 96/33735; European Patent No. 0 598 877; U.S. Pat. Nos. 5,413,923; 5,625,126; 5,633,425; 5,569,825; 5,661,016; 5,545,806; 5,814,318; 5,885,793; 5,916,771; 5,939,598; 6,075,181; and 6,114,598, which are incorporated by reference herein in their entirety. In addition, companies such as Abgenix, Inc. (Freemont, Calif.) and Genpharm (San Jose, Calif.) can be engaged to provide human antibodies directed against a selected antigen using technology similar to that described above.

[0240] Completely human antibodies which recognize a selected epitope can be generated using a technique referred to as “guided selection.” In this approach a selected non-human monoclonal antibody, e.g., a mouse antibody, is used to guide the selection of a completely human antibody recognizing the same epitope. (Jespers et al., Bio/technology 12:899-903 (1988)).

[0241] Further, antibodies to the polypeptides of the invention can, in turn, be utilized to generate anti-idiotype antibodies that “mimic” polypeptides of the invention using techniques well known to those skilled in the art. (See, e.g., Greenspan & Bona, FASEB J. 7(5):437-444; (1989) and Nissinoff, J. Immunol. 147(8):2429-2438 (1991)). For example, antibodies which bind to and competitively inhibit polypeptide multimerization and/or binding of a polypeptide of the invention to a ligand can be used to generate anti-idiotypes that “mimic” the polypeptide multimerization and/or binding domain and, as a consequence, bind to and neutralize polypeptide and/or its ligand. Such neutralizing anti-idiotypes or Fab fragments of such anti-idiotypes can be used in therapeutic regimens to neutralize polypeptide ligand(s)/receptor(s). For example, such anti-idiotypic antibodies can be used to bind a polypeptide of the invention and/or to bind its ligand(s)/receptor(s), and thereby block its biological activity. Alternatively, antibodies which bind to and enhance polypeptide multimerization and/or binding, and/or receptor/ligand multimerization, binding and/or signaling can be used to generate anti-idiotypes that function as agonists of a polypeptide of the invention and/or its ligand/receptor. Such agonistic anti-idiotypes or Fab fragments of such anti-idiotypes can be used in therapeutic regimens as agonists of the polypeptides of the invention or its ligand(s)/receptor(s). For example, such anti-idiotypic antibodies can be used to bind a polypeptide of the invention and/or to bind its ligand(s)/receptor(s), and thereby promote or enhance its biological activity.

[0242] Intrabodies of the invention can be produced using methods known in the art, such as those disclosed and reviewed in Chen et al., Hum. Gene Ther. 5:595-601 (1994); Marasco, W. A., Gene Ther. 4:11-15 (1997); Rondon and Marasco, Annu. Rev. Microbiol. 51:257-283 (1997); Proba et al., J. Mol. Biol. 275:245-253 (1998); Cohen et al., Oncogene 17:2445-2456 (1998); Ohage and Steipe, J. Mol. Biol. 291:1119-1128 (1999); Ohage et al., J. Mol. Biol. 291:1129-1134 (1999); Wirtz and Steipe, Protein Sci. 8:2245-2250 (1999); Zhu et al., J. Immunol. Methods 231:207-222 (1999); and references cited therein.

[0243] Polynucleotides Encoding Antibodies

[0244] The invention further provides polynucleotides comprising a nucleotide sequence encoding an antibody of the invention and fragments thereof. The invention also encompasses polynucleotides that hybridize under stringent or alternatively, under lower stringency hybridization conditions, e.g., as defined supra, to polynucleotides that encode an antibody, preferably, that specifically binds to a polypeptide of the invention, preferably, an antibody that binds to a polypeptide having the amino acid sequence of SEQ ID NO:Y, to a polypeptide encoded by a portion of SEQ ID NO:X as defined in columns 8 and 9 of Table 2, and/or to a polypeptide encoded by the cDNA contained in Clone ID NO:Z.

[0245] The polynucleotides may be obtained, and the nucleotide sequence of the polynucleotides determined, by any method known in the art. For example, if the nucleotide sequence of the antibody is known, a polynucleotide encoding the antibody may be assembled from chemically synthesized oligonucleotides (e.g., as described in Kutmeier et al., BioTechniques 17:242 (1994)), which, briefly, involves the synthesis of overlapping oligonucleotides containing portions of the sequence encoding the antibody, annealing and ligating of those oligonucleotides, and then amplification of the ligated oligonucleotides by PCR.

[0246] Alternatively, a polynucleotide encoding an antibody may be generated from nucleic acid from a suitable source. If a clone containing a nucleic acid encoding a particular antibody is not available, but the sequence of the antibody molecule is known, a nucleic acid encoding the immunoglobulin may be chemically synthesized or obtained from a suitable source (e.g., an antibody EDNA library, or a cDNA library generated from, or nucleic acid, preferably poly A+ RNA, isolated from, any tissue or cells expressing the antibody, such as hybridoma cells selected to express an antibody of the invention) by PCR amplification using synthetic primers hybridizable to the 3′ and 5′ ends of the sequence or by cloning using an oligonucleotide probe specific for the particular gene sequence to identify, e.g., a cDNA clone from a cDNA library that encodes the antibody. Amplified nucleic acids generated by PCR may then be cloned into replicable cloning vectors using any method well known in the art.

[0247] Once the nucleotide sequence and corresponding amino acid sequence of the antibody is determined, the nucleotide sequence of the antibody may be manipulated using methods well known in the art for the manipulation of nucleotide sequences, e.g., recombinant DNA techniques, site directed mutagenesis, PCR, etc. (see, for example, the techniques described in Sambrook et al., 1990, Molecular Cloning, A Laboratory Manual, 2d Ed., Cold Spring Harbor Laboratory, Cold Spring Harbor, N.Y. and Ausubel et al., eds., 1998, Current Protocols in Molecular Biology, John Wiley & Sons, NY, which are both incorporated by reference herein in their entireties), to generate antibodies having a different amino acid sequence, for example to create amino acid substitutions, deletions, and/or insertions.

[0248] In a specific embodiment, the amino acid sequence of the heavy and/or light chain variable domains may be inspected to identify the sequences of the complementarity determining regions (CDRs) by methods that are well know in the art, e.g., by comparison to known amino acid sequences of other heavy and light chain variable regions to determine the regions of sequence hypervariability. Using routine recombinant DNA techniques, one or more of the CDRs may be inserted within framework regions, e.g., into human framework regions to humanize a non-human antibody, as described supra. The framework regions may be naturally occurring or consensus framework regions, and preferably human framework regions (see, e.g., Chothia et al., J. Mol. Biol. 278: 457-479 (1998) for a listing of human framework regions). Preferably, the polynucleotide generated by the combination of the framework regions and CDRs encodes an antibody that specifically binds a polypeptide of the invention. Preferably, as discussed supra, one or more amino acid substitutions may be made within the framework regions, and, preferably, the amino acid substitutions improve binding of the antibody to its antigen. Additionally, such methods may be used to make amino acid substitutions or deletions of one or more variable region cysteine residues participating in an intrachain disulfide bond to generate antibody molecules lacking one or more intrachain disulfide bonds. Other alterations to the polynucleotide are encompassed by the present invention and within the skill of the art.

[0249] In addition, techniques developed for the production of “chimeric antibodies” (Morrison et al, Proc. Natl. Acad. Sci. 81:851-855 (1984); Neuberger et al., Nature 312:604-608 (1984); Takeda et al., Nature 314:452-454 (1985)) by splicing genes from a mouse antibody molecule of appropriate antigen specificity together with genes from a human antibody molecule of appropriate biological activity can be used. As described supra, a chimeric antibody is a molecule in which different portions are derived from different animal species, such as those having a variable region derived from a murine mAb and a human immunoglobulin constant region, e.g., humanized antibodies.

[0250] Alternatively, techniques described for the production of single chain antibodies (U.S. Pat. No. 4,946,778; Bird, Science 242:423-42 (1988); Huston et al., Proc. Natl. Acad. Sci. USA 85:5879-5883 (1988); and Ward et al., Nature 334:544-54 (1989)) can be adapted to produce single chain antibodies. Single chain antibodies are formed by linking the heavy and light chain fragments of the Fv region via an amino acid bridge, resulting in a single chain polypeptide. Techniques for the assembly of functional Fv fragments in E. coli may also be used (Skerra et al., Science 242:1038-1041 (1988)).

[0251] Methods of Producing Antibodies

[0252] The antibodies of the invention can be produced by any method known in the art for the synthesis of antibodies, in particular, by chemical synthesis or preferably, by recombinant expression techniques. Methods of producing antibodies include, but are not limited to, hybridoma technology, EBV transformation, and other methods discussed herein as well as through the use recombinant DNA technology, as discussed below.

[0253] Recombinant expression of an antibody of the invention, or fragment, derivative or analog thereof, (e.g., a heavy or light chain of an antibody of the invention or a single chain antibody of the invention), requires construction of an expression vector containing a polynucleotide that encodes the antibody. Once a polynucleotide encoding an antibody molecule or a heavy or light chain of an antibody, or portion thereof (preferably containing the heavy or light chain variable domain), of the invention has been obtained, the vector for the production of the antibody molecule may be produced by recombinant DNA technology using techniques well known in the art. Thus, methods for preparing a protein by expressing a polynucleotide containing an antibody encoding nucleotide sequence are described herein. Methods which are well known to those skilled in the art can be used to construct expression vectors containing antibody coding sequences and appropriate transcriptional and translational control signals. These methods include, for example, in vitro recombinant DNA techniques, synthetic techniques, and in vivo genetic recombination. The invention, thus, provides replicable vectors comprising a nucleotide sequence encoding an antibody molecule of the invention, or a heavy or light chain thereof, or a heavy or light chain variable domain, operably linked to a promoter. Such vectors may include the nucleotide sequence encoding the constant region of the antibody molecule (see, e.g., PCT Publication WO 86/05807; PCT Publication WO 89/01036; and U.S. Pat. No. 5,122,464) and the variable domain of the antibody may be cloned into such a vector for expression of the entire heavy or light chain.

[0254] The expression vector is transferred to a host cell by conventional techniques and the transfected cells are then cultured by conventional techniques to produce an antibody of the invention. Thus, the invention includes host cells containing a polynucleotide encoding an antibody of the invention, or a heavy or light chain thereof, or a single chain antibody of the invention, operably linked to a heterologous promoter. In preferred embodiments for the expression of double-chained antibodies, vectors encoding both the heavy and light chains may be co-expressed in the host cell for expression of the entire immunoglobulin molecule, as detailed below.

[0255] A variety of host-expression vector systems may be utilized to express the antibody molecules of the invention. Such host-expression systems represent vehicles by which the coding sequences of interest may be produced and subsequently purified, but also represent cells which may, when transformed or transfected with the appropriate nucleotide coding sequences, express an antibody molecule of the invention in situ. These include but are not limited to microorganisms such as bacteria (e.g., E. coli, B. subtilis) transformed with recombinant bacteriophage DNA, plasmid DNA or cosmid DNA expression vectors containing antibody coding sequences; yeast (e.g., Saccharomyces, Pichia) transformed with recombinant yeast expression vectors containing antibody coding sequences; insect cell systems infected with recombinant virus expression vectors (e.g., baculovirus) containing antibody coding sequences; plant cell systems infected with recombinant virus expression vectors (e.g., cauliflower mosaic virus, CaMV; tobacco mosaic virus, TMV) or transformed with recombinant plasmid expression vectors (e.g., Ti plasmid) containing antibody coding sequences; or mammalian cell systems (e.g., COS, CHO, BHK, 293, 3T3 cells) harboring recombinant expression constructs containing promoters derived from the genome of mammalian cells (e.g., metallothionein promoter) or from mammalian viruses (e.g., the adenovirus late promoter; the vaccinia virus 7.5K promoter). Preferably, bacterial cells such as Escherichia coli, and more preferably, eukaryotic cells, especially for the expression of whole recombinant antibody molecule, are used for the expression of a recombinant antibody molecule. For example, mammalian cells such as Chinese hamster ovary cells (CHO), in conjunction with a vector such as the major intermediate early gene promoter element from human cytomegalovirus is an effective expression system for antibodies (Foecking et al., Gene 45:101 (1986); Cockett et al., Bio/Technology 8:2 (1990)).

[0256] In bacterial systems, a number of expression vectors may be advantageously selected depending upon the use intended for the antibody molecule being expressed. For example, when a large quantity of such a protein is to be produced, for the generation of pharmaceutical compositions of an antibody molecule, vectors which direct the expression of high levels of fusion protein products that are readily purified may be desirable. Such vectors include, but are not limited, to the E. coli expression vector pUR278 (Ruther et al., EMBO J. 2:1791 (1983)), in which the antibody coding sequence may be ligated individually into the vector in frame with the lac Z coding region so that a fusion protein is produced; pIN vectors (Inouye & Inouye, Nucleic Acids Res. 13:3101-3109 (1985); Van Heeke & Schuster, J. Biol. Chem. 24:5503-5509 (1989)); and the like. pGEX vectors may also be used to express foreign polypeptides as fusion proteins with glutathione S-transferase (GST). In general, such fusion proteins are soluble and can easily be purified from lysed cells by adsorption and binding to matrix glutathione-agarose beads followed by elution in the presence of free glutathione. The pGEX vectors are designed to include thrombin or factor Xa protease cleavage sites so that the cloned target gene product can be released from the GST moiety.

[0257] In an insect system, Autographa californica nuclear polyhedrosis virus (AcNPV) is used as a vector to express foreign genes. The virus grows in Spodoptera frugiperda cells. The antibody coding sequence may be cloned individually into non-essential regions (for example the polyhedrin gene) of the virus and placed under control of an AcNPV promoter (for example the polyhedrin promoter).

[0258] In mammalian host cells, a number of viral-based expression systems may be utilized. In cases where an adenovirus is used as an expression vector, the antibody coding sequence of interest may be ligated to an adenovirus transcription/translation control complex, e.g., the late promoter and tripartite leader sequence. This chimeric gene may then be inserted in the adenovirus genome by in vitro or in vivo recombination. Insertion in a non-essential region of the viral genome (e.g., region E1 or E3) will result in a recombinant virus that is viable and capable of expressing the antibody molecule in infected hosts. (e.g., see Logan & Shenk, Proc. Natl. Acad. Sci. USA 81:355-359 (1984)). Specific initiation signals may also be required for efficient translation of inserted antibody coding sequences. These signals include the ATG initiation codon and adjacent sequences. Furthermore, the initiation codon must be in phase with the reading frame of the desired coding sequence to ensure translation of the entire insert. These exogenous translational control signals and initiation codons can be of a variety of origins, both natural and synthetic. The efficiency of expression may be enhanced by the inclusion of appropriate transcription enhancer elements, transcription terminators, etc. (see Bittner et al., Methods in Enzymol. 153:51-544 (1987)).

[0259] In addition, a host cell strain may be chosen which modulates the expression of the inserted sequences, or modifies and processes the gene product in the specific fashion desired. Such modifications (e.g., glycosylation) and processing (e.g., cleavage) of protein products may be important for the function of the protein. Different host cells have characteristic and specific mechanisms for the post-translational processing and modification of proteins and gene products. Appropriate cell lines or host systems can be chosen to ensure the correct modification and processing of the foreign protein expressed. To this end, eukaryotic host cells which possess the cellular machinery for proper processing of the primary transcript, glycosylation, and phosphorylation of the gene product may be used. Such mammalian host cells include but are not limited to CHO, VERY, BHK, Hela, COS, MDCK, 293, 3T3, WI38, and in particular, breast cancer cell lines such as, for example, BT483, Hs578T, HTB2, BT20 and T47D, and normal mammary gland cell line such as, for example, CRL7030 and Hs578Bst.

[0260] For long-term, high-yield production of recombinant proteins, stable expression is preferred. For example, cell lines which stably express the antibody molecule may be engineered. Rather than using expression vectors which contain viral origins of replication, host cells can be transformed with DNA controlled by appropriate expression control elements (e.g., promoter, enhancer, sequences, transcription terminators, polyadenylation sites, etc.), and a selectable marker. Following the introduction of the foreign DNA, engineered cells may be allowed to grow for 1-2 days in an enriched media, and then are switched to a selective media. The selectable marker in the recombinant plasmid confers resistance to the selection and allows cells to stably integrate the plasmid into their chromosomes and grow to form foci which in turn can be cloned and expanded into cell lines. This method may advantageously be used to engineer cell lines which express the antibody molecule. Such engineered cell lines may be particularly useful in screening and evaluation of compounds that interact directly or indirectly with the antibody molecule.

[0261] A number of selection systems may be used, including but not limited to the herpes simplex virus thymidine kinase (Wigler et al., Cell 11:223 (1977)), hypoxanthine-guanine phosphoribosyltransferase (Szybalska & Szybalski, Proc. Natl. Acad. Sci. USA 48:202 (1992)), and adenine phosphoribosyltransferase (Lowy et al., Cell 22:817 (1980)) genes can be employed in tk-, hgprt- or aprt-cells, respectively. Also, antimetabolite resistance can be used as the basis of selection for the following genes: dhfr, which confers resistance to methotrexate (Wigler et al., Natl. Acad. Sci. USA 77:357 (1980); O'Hare et al., Proc. Natl. Acad. Sci. USA 78:1527 (1981)); gpt, which confers resistance to mycophenolic acid (Mulligan & Berg, Proc. Natl. Acad. Sci. USA 78:2072 (1981)); neo, which confers resistance to the aminoglycoside G-418 Clinical Pharmacy 12:488-505; Wu and Wu, Biotherapy 3:87-95 (1991); Tolstoshev, Ann. Rev. Pharmacol. Toxicol. 32:573-596 (1993); Mulligan, Science 260:926-932 (1993); and Morgan and Anderson, Ann. Rev. Biochem. 62:191-217 (1993); May, 1993, TIB TECH 11(5):155-215 (1993)); and hygro, which confers resistance to hygromycin (Santerre et al., Gene 30:147 (1984)). Methods commonly known in the art of recombinant DNA technology may be routinely applied to select the desired recombinant clone, and such methods are described, for example, in Ausubel et al. (eds.), Current Protocols in Molecular Biology, John Wiley & Sons, NY (1993); Kriegler, Gene Transfer and Expression, A Laboratory Manual, Stockton Press, NY (1990); and in Chapters 12 and 13, Dracopoli et al. (eds), Current Protocols in Human Genetics, John Wiley & Sons, NY (1994); Colberre-Garapin et al., J. Mol. Biol. 150:1 (1981), which are incorporated by reference herein in their entireties.

[0262] The expression levels of an antibody molecule can be increased by vector amplification (for a review, see Bebbington and Hentschel, The use of vectors based on gene amplification for the expression of cloned genes in mammalian cells in DNA cloning, Vol.3. (Academic Press, New York, 1987)). When a marker in the vector system expressing antibody is amplifiable, increase in the level of inhibitor present in culture of host cell will increase the number of copies of the marker gene. Since the amplified region is associated with the antibody gene, production of the antibody will also increase (Crouse et al., Mol. Cell. Biol. 3:257 (1983)).

[0263] Vectors which use glutamine synthase (GS) or DHFR as the selectable markers can be amplified in the presence of the drugs methionine sulphoximine or methotrexate, respectively. An advantage of glutamine synthase based vectors are the availabilty of cell lines (e.g., the murine myeloma cell line, NSO) which are glutamine synthase negative. Glutamine synthase expression systems can also function in glutamine synthase expressing cells (e.g. Chinese Hamster Ovary (CHO) cells) by providing additional inhibitor to prevent the functioning of the endogenous gene. A glutamine synthase expression system and components thereof are detailed in PCT publications: WO87/04462; WO86/05807; WO89/01036; WO89/10404; and WO91/06657 which are incorporated in their entireties by reference herein. Additionally, glutamine synthase expression vectors that may be used according to the present invention are commercially available from suplliers, including, for example Lonza Biologics, Inc. (Portsmouth, N.H.). Expression and production of monoclonal antibodies using a GS expression system in murine myeloma cells is described in Bebbington et al., Bio/technology 10:169(1992) and in Biblia and Robinson Biotechnol. Prog. 11:1 (1995) which are incorporated in their entirities by reference herein.

[0264] The host cell may be co-transfected with two expression vectors of the invention, the first vector encoding a heavy chain derived polypeptide and the second vector encoding a light chain derived polypeptide. The two vectors may contain identical selectable markers which enable equal expression of heavy and light chain polypeptides. Alternatively, a single vector may be used which encodes, and is capable of expressing, both heavy and light chain polypeptides. In such situations, the light chain should be placed before the heavy chain to avoid an excess of toxic free heavy chain (Proudfoot, Nature 322:52 (1986); Kohler, Proc. Natl. Acad. Sci. USA 77:2197 (1980)). The coding sequences for the heavy and light chains may comprise cDNA or genomic DNA.

[0265] Once an antibody molecule of the invention has been produced by an animal, chemically synthesized, or recombinantly expressed, it may be purified by any method known in the art for purification of an immunoglobulin molecule, for example, by chromatography (e.g., ion exchange, affinity, particularly by affinity for the specific antigen after Protein A, and sizing column chromatography), centrifugation, differential solubility, or by any other standard technique for the purification of proteins. In addition, the antibodies of the present invention or fragments thereof can be fused to heterologous polypeptide sequences described herein or otherwise known in the art, to facilitate purification.

[0266] The present invention encompasses antibodies recombinantly fused or chemically conjugated (including both covalently and non-covalently conjugations) to a polypeptide (or portion thereof, preferably at least 10, 20, 30, 40, 50, 60, 70, 80, 90 or 100 amino acids of the polypeptide) of the present invention to generate fusion proteins. The fusion does not necessarily need to be direct, but may occur through linker sequences. The antibodies may be specific for antigens other than polypeptides (or portion thereof, preferably at least 10, 20, 30, 40, 50, 60, 70, 80, 90 or 100 amino acids of the polypeptide) of the present invention. For example, antibodies may be used to target the polypeptides of the present invention to particular cell types, either in vitro or in vivo, by fusing or conjugating the polypeptides of the present invention to antibodies specific for particular cell surface receptors. Antibodies fused or conjugated to the polypeptides of the present invention may also be used in in vitro immunoassays and purification methods using methods known in the art. See e.g., Harbor et al., supra, and PCT publication WO 93/21232; EP 439,095; Naramura et al., Immunol. Lett. 39:91-99 (1994); U.S. Pat. No. 5,474,981; Gillies et al., PNAS 89:1428-1432 (1992); Fell et al., J. Immunol. 146:2446-2452 (1991), which are incorporated by reference in their entireties.

[0267] The present invention further includes compositions comprising the polypeptides of the present invention fused or conjugated to antibody domains other than the variable regions. For example, the polypeptides of the present invention may be fused or conjugated to an antibody Fc region, or portion thereof. The antibody portion fused to a polypeptide of the present invention may comprise the constant region, hinge region, CH1 domain, CH2 domain, and CH3 domain or any combination of whole domains or portions thereof. The polypeptides may also be fused or conjugated to the above antibody portions to form multimers. For example, Fc portions fused to the polypeptides of the present invention can form dimers through disulfide bonding between the Fc portions. Higher multimeric forms can be made by fusing the polypeptides to portions of IgA and IgM. Methods for fusing or conjugating the polypeptides of the present invention to antibody portions are known in the art. See, e.g., U.S. Pat. Nos. 5,336,603; 5,622,929; 5,359,046; 5,349,053; 5,447,851; 5,112,946; EP 307,434; EP 367,166; PCT publications WO 96/04388; WO 91/06570; Ashkenazi et al., Proc. Natl. Acad. Sci. USA 88:10535-10539 (1991); Zheng et al., J. Immunol. 154:5590-5600 (1995); and Vil et al., Proc. Natl. Acad. Sci. USA 89:11337-11341 (1992) (said references incorporated by reference in their entireties).

[0268] As discussed, supra, the polypeptides corresponding to a polypeptide, polypeptide fragment, or a variant of SEQ ID NO:Y may be fused or conjugated to the above antibody portions to increase the in vivo half life of the polypeptides or for use in immunoassays using methods known in the art. Further, the polypeptides corresponding to SEQ ID NO:Y may be fused or conjugated to the above antibody portions to facilitate purification. One reported example describes chimeric proteins consisting of the first two domains of the human CD4-polypeptide and various domains of the constant regions of the heavy or light chains of mammalian immunoglobulins. See EP 394,827; and Traunecker et al., Nature 331:84-86 (1988). The polypeptides of the present invention fused or conjugated to an antibody having disulfide-linked dimeric structures (due to the IgG) may also be more efficient in binding and neutralizing other molecules, than the monomeric secreted protein or protein fragment alone. See, for example, Fountoulakis et al., J. Biochem. 270:3958-3964 (1995). In many cases, the Fc part in a fusion protein is beneficial in therapy and diagnosis, and thus can result in, for example, improved pharmacokinetic properties. See, for example, EP A 232,262. Alternatively, deleting the Fc part after the fusion protein has been expressed, detected, and purified, would be desired. For example, the Fe portion may hinder therapy and diagnosis if the fusion protein is used as an antigen for immunizations. In drug discovery, for example, human proteins, such as hIL-5, have been fused with Fc portions for the purpose of high-throughput screening assays to identify antagonists of hIL-5. (See, Bennett et al., J. Molecular Recognition 8:52-58 (1995); Johanson et al., J. Biol. Chem. 270:9459-9471 (1995)).

[0269] Moreover, the antibodies or fragments thereof of the present invention can be fused to marker sequences, such as a peptide to facilitate purification. In preferred embodiments, the marker amino acid sequence is a hexa-histidine peptide, such as the tag provided in a pQE vector (QIAGEN, Inc., 9259 Eton Avenue, Chatsworth, Calif., 91311), among others, many of which are commercially available. As described in Gentz et al., Proc. Natl. Acad. Sci. USA 86:821-824 (1989), for instance, hexa-histidine provides for convenient purification of the fusion protein. Other peptide tags useful for purification include, but are not limited to, the “HA” tag, which corresponds to an epitope derived from the influenza hemagglutinin protein (Wilson et al., Cell 37:767 (1984)) and the “flag” tag.

[0270] The present invention further encompasses antibodies or fragments thereof conjugated to a diagnostic or therapeutic agent. The antibodies can be used diagnostically to, for example, monitor the development or progression of a tumor as part of a clinical testing procedure to, e.g., determine the efficacy of a given treatment regimen. Detection can be facilitated by coupling the antibody to a detectable substance. Examples of detectable substances include various enzymes, prosthetic groups, fluorescent materials, luminescent materials, bioluminescent materials, radioactive materials, positron emitting metals using various positron emission tomographies, and nonradioactive paramagnetic metal ions. The detectable substance may be coupled or conjugated either directly to the antibody (or fragment thereof) or indirectly, through an intermediate (such as, for example, a linker known in the art) using techniques known in the art. See, for example, U.S. Pat. No. 4,741,900 for metal ions which can be conjugated to antibodies for use as diagnostics according to the present invention. Examples of suitable enzymes include horseradish peroxidase, alkaline phosphatase, beta-galactosidase, or acetylcholinesterase; examples of suitable prosthetic group complexes include streptavidin/biotin and avidin/biotin; examples of suitable fluorescent materials include umbelliferone, fluorescein, fluorescein isothiocyanate, rhodamine, dichlorotriazinylamine fluorescein, dansyl chloride or phycoerythrin; an example of a luminescent material includes luminol; examples of bioluminescent materials include luciferase, luciferin, and aequorin; and examples of suitable radioactive material include 125I, 131I, 111In or 99Tc.

[0271] Further, an antibody or fragment thereof may be conjugated to a therapeutic moiety such as a cytotoxin, e.g., a cytostatic or cytocidal agent, a therapeutic agent or a radioactive metal ion, e.g., alpha-emitters such as, for example, 213Bi. A cytotoxin or cytotoxic agent includes any agent that is detrimental to cells. Examples include paclitaxol, cytochalasin B, gramicidin D, ethidium bromide, emetine, mitomycin, etoposide, tenoposide, vincristine, vinblastine, colchicin, doxorubicin, daunorubicin, dihydroxy anthracin dione, mitoxantrone, mithramycin, actinomycin D, 1-dehydrotestosterone, glucocorticoids, procaine, tetracaine, lidocaine, propranolol, and puromycin and analogs or homologs thereof. Therapeutic agents include, but are not limited to, antimetabolites (e.g., methotrexate, 6-mercaptopurine, 6-thioguanine, cytarabine, 5-fluorouracil decarbazine), alkylating agents (e.g., mechlorethamine, thioepa chlorambucil, melphalan, carmustine (BSNU) and lomustine (CCNU), cyclothosphamide, busulfan, dibromomannitol, streptozotocin, mitomycin C, and cis-dichlorodiamine platinum (II) (DDP) cisplatin), anthracyclines (e.g., daunorubicin (formerly daunomycin) and doxorubicin), antibiotics (e.g., dactinomycin (formerly actinomycin), bleomycin, mithramycin, and anthramycin (AMC)), and anti-mitotic agents (e.g., vincristine and vinblastine).

[0272] The conjugates of the invention can be used for modifying a given biological response, the therapeutic agent or drug moiety is not to be construed as limited to classical chemical therapeutic agents. For example, the drug moiety may be a protein or polypeptide possessing a desired biological activity. Such proteins may include, for example, a toxin such as abrin, ricin A, pseudomonas exotoxin, or diphtheria toxin; a protein such as tumor necrosis factor, a-interferon, β-interferon, nerve growth factor, platelet derived growth factor, tissue plasminogen activator, an apoptotic agent, e.g., TNF-alpha, TNF-beta, AIM I (See, International Publication No. WO 97/33899), AIM II (See, International Publication No. WO 97/34911), Fas Ligand (Takahashi et al., Int. Immunol., 6:1567-1574 (1994)), VEGI (See, International Publication No. WO 99/23105), a thrombotic agent or an anti-angiogenic agent, e.g., angiostatin or endostatin; or, biological response modifiers such as, for example, lymphokines, interleukin-1 (“IL-1”), interleukin-2 (“IL-2”), interleukin-6 (“IL-6”), granulocyte macrophage colony stimulating factor (“GM-CSF”), granulocyte colony stimulating factor (“G-CSF”), or other growth factors.

[0273] Antibodies may also be attached to solid supports, which are particularly useful for immunoassays or purification of the target antigen. Such solid supports include, but are not limited to, glass, cellulose, polyacrylamide, nylon, polystyrene, polyvinyl chloride or polypropylene.

[0274] Techniques for conjugating such therapeutic moiety to antibodies are well known. See, for example, Arnon et al., “Monoclonal Antibodies For Immunotargeting Of Drugs In Cancer Therapy”, in Monoclonal Antibodies And Cancer Therapy, Reisfeld et al. (eds.), pp. 243-56 (Alan R. Liss, Inc. 1985); Hellstrom et al., “Antibodies For Drug Delivery”, in Controlled Drug Delivery (2nd Ed.), Robinson et al. (eds.), pp. 623-53 (Marcel Dekker, Inc. 1987); Thorpe, “Antibody Carriers Of Cytotoxic Agents In Cancer Therapy: A Review”, in Monoclonal Antibodies 84: Biological And Clinical Applications, Pinchera et al. (eds.), pp. 475-506 (1985); “Analysis, Results, And Future Prospective Of The Therapeutic Use Of Radiolabeled Antibody In Cancer Therapy”, in Monoclonal Antibodies For Cancer Detection And Therapy, Baldwin et al. (eds.), pp. 303-16 (Academic Press 1985), and Thorpe et al., “The Preparation And Cytotoxic Properties Of Antibody-Toxin Conjugates”, Immunol. Rev. 62:119-58 (1982).

[0275] Alternatively, an antibody can be conjugated to a second antibody to form an antibody heteroconjugate as described by Segal in U.S. Pat. No. 4,676,980, which is incorporated herein by reference in its entirety.

[0276] An antibody, with or without a therapeutic moiety conjugated to it, administered alone or in combination with cytotoxic factor(s) and/or cytokine(s) can be used as a therapeutic.

[0277] Immunophenotyping

[0278] The antibodies of the invention may be utilized for immunophenotyping of cell lines and biological samples. Translation products of the gene of the present invention may be useful as cell-specific markers, or more specifically as cellular markers that are differentially expressed at various stages of differentiation and/or maturation of particular cell types. Monoclonal antibodies directed against a specific epitope, or combination of epitopes, will allow for the screening of cellular populations expressing the marker. Various techniques can be utilized using monoclonal antibodies to screen for cellular populations expressing the marker(s), and include magnetic separation using antibody-coated magnetic beads, “panning” with antibody attached to a solid matrix (i.e., plate), and flow cytometry (See, e.g., U.S. Pat. No. 5,985,660; and Morrison et al., Cell, 96:737-49 (1999)).

[0279] These techniques allow for the screening of particular populations of cells, such as might be found with hematological malignancies (i.e. minimal residual disease (MRD) in acute leukemic patients) and “non-self” cells in transplantations to prevent Graft-versus-Host Disease (GVHD). Alternatively, these techniques allow for the screening of hematopoietic stem and progenitor cells capable of undergoing proliferation and/or differentiation, as might be found in human umbilical cord blood.

[0280] Assays For Antibody Binding

[0281] The antibodies of the invention may be assayed for immunospecific binding by any method known in the art. The immunoassays which can be used include but are not limited to competitive and non-competitive assay systems using techniques such as western blots, radioimmunoassays, ELISA (enzyme linked immunosorbent assay), “sandwich” immunoassays, immunoprecipitation assays, precipitin reactions, gel diffusion precipitin reactions, immunodiffusion assays, agglutination assays, complement-fixation assays, immunoradiometric assays, fluorescent immunoassays, and protein A immunoassays, to name but a few. Such assays are routine and well known in the art (see, e.g., Ausubel et al, eds, 1994, Current Protocols in Molecular Biology, Vol. 1, John Wiley & Sons, Inc., New York, which is incorporated by reference herein in its entirety). Exemplary immunoassays are described briefly below (but are not intended by way of limitation).

[0282] Immunoprecipitation protocols generally comprise lysing a population of cells in a lysis buffer such as RIPA buffer (1% NP-40 or Triton X-100, 1% sodium deoxycholate,

[0283] 0.1% SDS, 0.15 M NaCl, 0.01 M sodium phosphate at pH 7.2, 1% Trasylo1) supplemented with protein phosphatase and/or protease inhibitors (e.g., EDTA, PMSF, aprotinin, sodium vanadate), adding the antibody of interest to the cell lysate, incubating for a period of time (e.g., 1-4 hours) at 4° C., adding protein A and/or protein G sepharose beads to the cell lysate, incubating for about an hour or more at 4° C., washing the beads in lysis buffer and resuspending the beads in SDS/sample buffer. The ability of the antibody of interest to immunoprecipitate a particular antigen can be assessed by, e.g., western blot analysis. One of skill in the art would be knowledgeable as to the parameters that can be modified to increase the binding of the antibody to an antigen and decrease the background (e.g., pre-clearing the cell lysate with sepharose beads). For further discussion regarding immunoprecipitation protocols see, e.g., Ausubel et al., eds., (1994), Current Protocols in Molecular Biology, Vol. 1, John Wiley & Sons, Inc., New York, section 10.16.1.

[0284] Western blot analysis generally comprises preparing protein samples, electrophoresis of the protein samples in a polyacrylamide gel (e.g., 8%-20% SDS-PAGE depending on the molecular weight of the antigen), transferring the protein sample from the polyacrylamide gel to a membrane such as nitrocellulose, PVDF or nylon, blocking the membrane in blocking solution (e.g., PBS with 3% BSA or non-fat milk), washing the membrane in washing buffer (e.g., PBS-Tween 20), blocking the membrane with primary antibody (the antibody of interest) diluted in blocking buffer, washing the membrane in washing buffer, blocking the membrane with a secondary antibody (which recognizes the primary antibody, e.g., an anti-human antibody) conjugated to an enzymatic substrate (e.g., horseradish peroxidase or alkaline phosphatase) or radioactive molecule (e.g., 32P or 125I) diluted in blocking buffer, washing the membrane in wash buffer, and detecting the presence of the antigen. One of skill in the art would be knowledgeable as to the parameters that can be modified to increase the signal detected and to reduce the background noise. For further discussion regarding western blot protocols see, e.g., Ausubel et al, eds, (1994), Current Protocols in Molecular Biology, Vol. 1, John Wiley & Sons, Inc., New York, section 10.8.1.

[0285] ELISAs comprise preparing antigen, coating the well of a 96 well microtiter plate with the antigen, adding the antibody of interest conjugated to a detectable compound such as an enzymatic substrate (e.g., horseradish peroxidase or alkaline phosphatase) to the well and incubating for a period of time, and detecting the presence of the antigen. In ELISAs the antibody of interest does not have to be conjugated to a detectable compound; instead, a second antibody (which recognizes the antibody of interest) conjugated to a detectable compound may be added to the well. Further, instead of coating the well with the antigen, the antibody may be coated to the well. In this case, a second antibody conjugated to a detectable compound may be added following the addition of the antigen of interest to the coated well. One of skill in the art would be knowledgeable as to the parameters that can be modified to increase the signal detected as well as other variations of ELISAs known in the art. For further discussion regarding ELISAs see, e.g., Ausubel et al, eds, (1994), Current Protocols in Molecular Biology, Vol. 1, John Wiley & Sons, Inc., New York, section 11.2.1.

[0286] The binding affinity of an antibody to an antigen and the off-rate of an antibody-antigen interaction can be determined by competitive binding assays. One example of a competitive binding assay is a radioimmunoassay comprising the incubation of labeled antigen (e.g., 3H or 125I) with the antibody of interest in the presence of increasing amounts of unlabeled antigen, and the detection of the antibody bound to the labeled antigen. The affinity of the antibody of interest for a particular antigen and the binding off-rates can be determined from the data by scatchard plot analysis. Competition with a second antibody can also be determined using radioimmunoassays. In this case, the antigen is incubated with antibody of interest conjugated to a labeled compound (e.g., 3H or 125I) in the presence of increasing amounts of an unlabeled second antibody.

[0287] Antibodies of the invention may be characterized using immunocytochemisty methods on cells (e.g., mammalian cells, such as CHO cells) transfected with a vector enabling the expression of an antigen or with vector alone using techniques commonly known in the art. Antibodies that bind antigen transfected cells, but not vector-only transfected cells, are antigen specific.

[0288] Therapeutic Uses

[0289] The present invention is further directed to antibody-based therapies which involve administering antibodies of the invention to an animal, preferably a mammal, and most preferably a human, patient for treating one or more of the disclosed diseases, disorders, or conditions. Therapeutic compounds of the invention include, but are not limited to, antibodies of the invention (including fragments, analogs and derivatives thereof as described herein) and nucleic acids encoding antibodies of the invention (including fragments, analogs and derivatives thereof and anti-idiotypic antibodies as described herein). The antibodies of the invention can be used to treat, inhibit or prevent diseases, disorders or conditions associated with aberrant expression and/or activity of a polypeptide of the invention, including, but not limited to, any one or more of the diseases, disorders, or conditions described herein. The treatment and/or prevention of diseases, disorders, or conditions associated with aberrant expression and/or activity of a polypeptide of the invention includes, but is not limited to, alleviating symptoms associated with those diseases, disorders or conditions. Antibodies of the invention may be provided in pharmaceutically acceptable compositions as known in the art or as described herein.

[0290] In a specific and preferred embodiment, the present invention is directed to antibody-based therapies which involve administering antibodies of the invention to an animal, preferably a mammal, and most preferably a human, patient for treating one or more diseases, disorders, or conditions, including but not limited to: neural disorders, immune system disorders, muscular disorders, reproductive disorders, gastrointestinal disorders, pulmonary disorders, cardiovascular disorders, renal disorders, proliferative disorders, and/or cancerous diseases and conditions., and/or as described elsewhere herein. Therapeutic compounds of the invention include, but are not limited to, antibodies of the invention (e.g., antibodies directed to the full length protein expressed on the cell surface of a mammalian cell; antibodies directed to an epitope of a polypeptide of the invention (such as, for example, a predicted linear epitope shown in column 7 of Table 1A; or a conformational epitope, including fragments, analogs and derivatives thereof as described herein) and nucleic acids encoding antibodies of the invention (including fragments, analogs and derivatives thereof and anti-idiotypic antibodies as described herein). The antibodies of the invention can be used to treat, inhibit or prevent diseases, disorders or conditions associated with aberrant expression and/or activity of a polypeptide of the invention, including, but not limited to, any one or more of the diseases, disorders, or conditions described herein. The treatment and/or prevention of diseases, disorders, or conditions associated with aberrant expression and/or activity of a polypeptide of the invention includes, but is not limited to, alleviating symptoms associated with those diseases, disorders or conditions. Antibodies of the invention may be provided in pharmaceutically acceptable compositions as known in the art or as described herein.

[0291] A summary of the ways in which the antibodies of the present invention may be used therapeutically includes binding polynucleotides or polypeptides of the present invention locally or systemically in the body or by direct cytotoxicity of the antibody, e.g. as mediated by complement (CDC) or by effector cells (ADCC). Some of these approaches are described in more detail below. Armed with the teachings provided herein, one of ordinary skill in the art will know how to use the antibodies of the present invention for diagnostic, monitoring or therapeutic purposes without undue experimentation.

[0292] The antibodies of this invention may be advantageously utilized in combination with other monoclonal or chimeric antibodies, or with lymphokines or hematopoietic growth factors (such as, e.g., IL-2, IL-3 and IL-7), for example, which serve to increase the number or activity of effector cells which interact with the antibodies.

[0293] The antibodies of the invention may be administered alone or in combination with other types of treatments (e.g., radiation therapy, chemotherapy, hormonal therapy, immunotherapy and anti-tumor agents). Generally, administration of products of a species origin or species reactivity (in the case of antibodies) that is the same species as that of the patient is preferred. Thus, in a preferred embodiment, human antibodies, fragments derivatives, analogs, or nucleic acids, are administered to a human patient for therapy or prophylaxis.

[0294] It is preferred to use high affinity and/or potent in vivo inhibiting and/or neutralizing antibodies against polypeptides or polynucleotides of the present invention, fragments or regions thereof, for both immunoassays directed to and therapy of disorders related to polynucleotides or polypeptides, including fragments thereof, of the present invention. Such antibodies, fragments, or regions, will preferably have an affinity for polynucleotides or polypeptides of the invention, including fragments thereof. Preferred binding affinities include those with a dissociation constant or Kd less than 5×10⁻² M, 10⁻² M, 5×10⁻³ M, 10⁻³ M, 5×10⁻⁴ M, 10⁻⁴ M, 5×10⁻⁵ M, 10⁻⁵ M, 5×10⁻⁶ M, 10⁻⁶ M, 5×10⁻⁷ M, 10⁻⁷ M, 5×10⁻⁸ M, 10⁻⁸ M, 5×10⁻⁹ M, 10⁻⁹ M, 5×10⁻¹⁰ M, 10⁻¹⁰ M, 5×10⁻¹¹ M, 10⁻¹¹ M, 5×10⁻¹² M, 10⁻¹² M, 5×10⁻¹³ M, 10⁻¹³ M, 5×10⁻¹⁴ M, 10⁻¹⁴ M, 5×10⁻¹⁵ M, and 10⁻¹⁵ M.

[0295] Gene Therapy

[0296] In a specific embodiment, nucleic acids comprising sequences encoding antibodies or functional derivatives thereof, are administered to treat, inhibit or prevent a disease or disorder associated with aberrant expression and/or activity of a polypeptide of the invention, by way of gene therapy. Gene therapy refers to therapy performed by the administration to a subject of an expressed or expressible nucleic acid. In this embodiment of the invention, the nucleic acids produce their encoded protein that mediates a therapeutic effect.

[0297] Any of the methods for gene therapy available in the art can be used according to the present invention. Exemplary methods are described below.

[0298] For general reviews of the methods of gene therapy, see Goldspiel et al., Clinical Pharmacy 12:488-505 (1993); Wu and Wu, Biotherapy 3:87-95 (1991); Tolstoshev, Ann. Rev. Pharmacol. Toxicol. 32:573-596 (1993); Mulligan, Science 260:926-932 (1993); and Morgan and Anderson, Ann. Rev. Biochem. 62:191-217 (1993); May, TIBTECH 11(5):155-215 (1993). Methods commonly known in the art of recombinant DNA technology which can be used are described in Ausubel et al. (eds.), Current Protocols in Molecular Biology, John Wiley & Sons, NY (1993); and Kriegler, Gene Transfer and Expression, A Laboratory Manual, Stockton Press, NY (1990).

[0299] In a preferred embodiment, the compound comprises nucleic acid sequences encoding an antibody, said nucleic acid sequences being part of expression vectors that express the antibody or fragments or chimeric proteins or heavy or light chains thereof in a suitable host. In particular, such nucleic acid sequences have promoters operably linked to the antibody coding region, said promoter being inducible or constitutive, and, optionally, tissue-specific. In another particular embodiment, nucleic acid molecules are used in which the antibody coding sequences and any other desired sequences are flanked by regions that promote homologous recombination at a desired site in the genome, thus providing for intrachromosomal expression of the antibody encoding nucleic acids (Koller and Smithies, Proc. Natl. Acad. Sci. USA 86:8932-8935 (1989); Zijlstra et al., Nature 342:435-438 (1989). In specific embodiments, the expressed antibody molecule is a single chain antibody; alternatively, the nucleic acid sequences include sequences encoding both the heavy and light chains, or fragments thereof, of the antibody.

[0300] Delivery of the nucleic acids into a patient may be either direct, in which case the patient is directly exposed to the nucleic acid or nucleic acid-carrying vectors, or indirect, in which case, cells are first transformed with the nucleic acids in vitro, then transplanted into the patient. These two approaches are known, respectively, as in vivo or ex vivo gene therapy.

[0301] In a specific embodiment, the nucleic acid sequences are directly administered in vivo, where it is expressed to produce the encoded product. This can be accomplished by any of numerous methods known in the art, e.g., by constructing them as part of an appropriate nucleic acid expression vector and administering it so that they become intracellular, e.g., by infection using defective or attenuated retrovirals or other viral vectors (see U.S. Pat. No. 4,980,286), or by direct injection of naked DNA, or by use of microparticle bombardment (e.g., a gene gun; Biolistic, Dupont), or coating with lipids or cell-surface receptors or transfecting agents, encapsulation in liposomes, microparticles, or microcapsules, or by administering them in linkage to a peptide which is known to enter the nucleus, by administering it in linkage to a ligand subject to receptor-mediated endocytosis (see, e.g., Wu and Wu, J. Biol. Chem. 262:4429-4432 (1987)) (which can be used to target cell types specifically expressing the receptors), etc. In another embodiment, nucleic acid-ligand complexes can be formed in which the ligand comprises a fusogenic viral peptide to disrupt endosomes, allowing the nucleic acid to avoid lysosomal degradation. In yet another embodiment, the nucleic acid can be targeted in vivo for cell specific uptake and expression, by targeting a specific receptor (see, e.g., PCT Publications WO 92/06180; WO 92/22635; WO92/20316; WO93/14188, WO 93/20221). Alternatively, the nucleic acid can be introduced intracellularly and incorporated within host cell DNA for expression, by homologous recombination (Koller and Smithies, Proc. Natl. Acad. Sci. USA 86:8932-8935 (1989); Zijlstra et al., Nature 342:435-438 (1989)).

[0302] In a specific embodiment, viral vectors that contains nucleic acid sequences encoding an antibody of the invention are used. For example, a retroviral vector can be used (see Miller et al., Meth. Enzymol. 217:581-599 (1993)). These retroviral vectors contain the components necessary for the correct packaging of the viral genome and integration into the host cell DNA. The nucleic acid sequences encoding the antibody to be used in gene therapy are cloned into one or more vectors, which facilitates delivery of the gene into a patient. More detail about retroviral vectors can be found in Boesen et al., Biotherapy 6:291-302 (1994), which describes the use of a retroviral vector to deliver the mdr1 gene to hematopoietic stem cells in order to make the stem cells more resistant to chemotherapy. Other references illustrating the use of retroviral vectors in gene therapy are: Clowes et al., J. Clin. Invest. 93:644-651 (1994); Kiem et al., Blood 83:1467-1473 (1994); Salmons and Gunzberg, Human Gene Therapy 4:129-141 (1993); and Grossman and Wilson, Curr. Opin. in Genetics and Devel. 3:110-114 (1993).

[0303] Adenoviruses are other viral vectors that can be used in gene therapy. Adenoviruses are especially attractive vehicles for delivering genes to respiratory epithelia. Adenoviruses naturally infect respiratory epithelia where they cause a mild disease. Other targets for adenovirus-based delivery systems are liver, the central nervous system, endothelial cells, and muscle. Adenoviruses have the advantage of being capable of infecting non-dividing cells. Kozarsky and Wilson, Current Opinion in Genetics and Development 3:499-503 (1993) present a review of adenovirus-based gene therapy. Bout et al., Human Gene Therapy 5:3-10 (1994) demonstrated the use of adenovirus vectors to transfer genes to the respiratory epithelia of rhesus monkeys. Other instances of the use of adenoviruses in gene therapy can be found in Rosenfeld et al., Science 252:431-434 (1991); Rosenfeld et al., Cell 68:143-155 (1992); Mastrangeli et al., J. Clin. Invest. 91:225-234 (1993); PCT Publication WO94/12649; and Wang, et al., Gene Therapy 2:775-783 (1995). In a preferred embodiment, adenovirus vectors are used.

[0304] Adeno-associated virus (AAV) has also been proposed for use in gene therapy (Walsh et al., Proc. Soc. Exp. Biol. Med. 204:289-300 (1993); U.S. Pat. No. 5,436,146).

[0305] Another approach to gene therapy involves transferring a gene to cells in tissue culture by such methods as electroporation, lipofection, calcium phosphate mediated transfection, or viral infection. Usually, the method of transfer includes the transfer of a selectable marker to the cells. The cells are then placed under selection to isolate those cells that have taken up and are expressing the transferred gene. Those cells are then delivered to a patient.

[0306] In this embodiment, the nucleic acid is introduced into a cell prior to administration in vivo of the resulting recombinant cell. Such introduction can be carried out by any method known in the art, including but not limited to transfection, electroporation, microinjection, infection with a viral or bacteriophage vector containing the nucleic acid sequences, cell fusion, chromosome-mediated gene transfer, microcell-mediated gene transfer, spheroplast fusion, etc. Numerous techniques are known in the art for the introduction of foreign genes into cells (see, e.g., Loeffler and Behr, Meth. Enzymol. 217:599-618 (1993); Cohen et al., Meth. Enzymol. 217:618-644 (1993); Cline, Pharmac. Ther. 29:69-92m (1985) and may be used in accordance with the present invention, provided that the necessary developmental and physiological functions of the recipient cells are not disrupted. The technique should provide for the stable transfer of the nucleic acid to the cell, so that the nucleic acid is expressible by the cell and preferably heritable and expressible by its cell progeny.

[0307] The resulting recombinant cells can be delivered to a patient by various methods known in the art. Recombinant blood cells (e.g., hematopoietic stem or progenitor cells) are preferably administered intravenously. The amount of cells envisioned for use depends on the desired effect, patient state, etc., and can be determined by one skilled in the art.

[0308] Cells into which a nucleic acid can be introduced for purposes of gene therapy encompass any desired, available cell type, and include but are not limited to epithelial cells, endothelial cells, keratinocytes, fibroblasts, muscle cells, hepatocytes; blood cells such as T lymphocytes, B lymphocytes, monocytes, macrophages, neutrophils, eosinophils, megakaryocytes, granulocytes; various stem or progenitor cells, in particular hematopoietic stem or progenitor cells, e.g., as obtained from bone marrow, umbilical cord blood, peripheral blood, fetal liver, etc.

[0309] In a preferred embodiment, the cell used for gene therapy is autologous to the patient.

[0310] In an embodiment in which recombinant cells are used in gene therapy, nucleic acid sequences encoding an antibody are introduced into the cells such that they are expressible by the cells or their progeny, and the recombinant cells are then administered in vivo for therapeutic effect. In a specific embodiment, stem or progenitor cells are used. Any stem and/or progenitor cells which can be isolated and maintained in vitro can potentially be used in accordance with this embodiment of the present invention (see e.g. PCT Publication WO 94/08598; Stemple and Anderson, Cell 71:973-985 (1992); Rheinwald, Meth. Cell Bio. 21A:229 (1980); and Pittelkow and Scott, Mayo Clinic Proc. 61:771 (1986)).

[0311] In a specific embodiment, the nucleic acid to be introduced for purposes of gene therapy comprises an inducible promoter operably linked to the coding region, such that expression of the nucleic acid is controllable by the presence or absence of an appropriate inducer of transcription.

[0312] Demonstration of Therapeutic or Prophylactic Activity

[0313] The compounds or pharmaceutical compositions of the invention are preferably tested in vitro, and then in vivo for the desired therapeutic or prophylactic activity, prior to use in humans. For example, in vitro assays to demonstrate the therapeutic or prophylactic utility of a compound or pharmaceutical composition include, the effect of a compound on a cell line or a patient tissue sample. The effect of the compound or composition on the cell line and/or tissue sample can be determined utilizing techniques known to those of skill in the art including, but not limited to, rosette formation assays and cell lysis assays. In accordance with the invention, in vitro assays which can be used to determine whether administration of a specific compound is indicated, include in vitro cell culture assays in which a patient tissue sample is grown in culture, and exposed to or otherwise administered a compound, and the effect of such compound upon the tissue sample is observed.

[0314] Therapeutic/Prophylactic Administration and Composition

[0315] The invention provides methods of treatment, inhibition and prophylaxis by administration to a subject of an effective amount of a compound or pharmaceutical composition of the invention, preferably a polypeptide or antibody of the invention. In a preferred embodiment, the compound is substantially purified (e.g., substantially free from substances that limit its effect or produce undesired side-effects). The subject is preferably an animal, including but not limited to animals such as cows, pigs, horses, chickens, cats, dogs, etc., and is preferably a mammal, and most preferably human.

[0316] Formulations and methods of administration that can be employed when the compound comprises a nucleic acid or an immunoglobulin are described above; additional appropriate formulations and routes of administration can be selected from among those described herein below.

[0317] Various delivery systems are known and can be used to administer a compound of the invention, e.g., encapsulation in liposomes, microparticles, microcapsules, recombinant cells capable of expressing the compound, receptor-mediated endocytosis (see, e.g., Wu and Wu, J. Biol. Chem. 262:4429-4432 (1987)), construction of a nucleic acid as part of a retroviral or other vector, etc. Methods of introduction include but are not limited to intradermal, intramuscular, intraperitoneal, intravenous, subcutaneous, intranasal, epidural, and oral routes. The compounds or compositions may be administered by any convenient route, for example by infusion or bolus injection, by absorption through epithelial or mucocutaneous linings (e.g., oral mucosa, rectal and intestinal mucosa, etc.) and may be administered together with other biologically active agents. Administration can be systemic or local. In addition, it may be desirable to introduce the pharmaceutical compounds or compositions of the invention into the central nervous system by any suitable route, including intraventricular and intrathecal injection; intraventricular injection may be facilitated by an intraventricular catheter, for example, attached to a reservoir, such as an Ommaya reservoir. Pulmonary administration can also be employed, e.g., by use of an inhaler or nebulizer, and formulation with an aerosolizing agent.

[0318] In a specific embodiment, it may be desirable to administer the pharmaceutical compounds or compositions of the invention locally to the area in need of treatment; this may be achieved by, for example, and not by way of limitation, local infusion during surgery, topical application, e.g., in conjunction with a wound dressing after surgery, by injection, by means of a catheter, by means of a suppository, or by means of an implant, said implant being of a porous, non-porous, or gelatinous material, including membranes, such as sialastic membranes, or fibers. Preferably, when administering a protein, including an antibody, of the invention, care must be taken to use materials to which the protein does not absorb.

[0319] In another embodiment, the compound or composition can be delivered in a vesicle, in particular a liposome (see Langer, Science 249:1527-1533 (1990); Treat et al., in Liposomes in the Therapy of Infectious Disease and Cancer, Lopez-Berestein and Fidler (eds.), Liss, New York, pp. 353-365 (1989); Lopez-Berestein, ibid., pp. 317-327; see generally ibid.)

[0320] In yet another embodiment, the compound or composition can be delivered in a controlled release system. In one embodiment, a pump may be used (see Langer, supra; Sefton, CRC Crit. Ref. Biomed. Eng. 14:201 (1987); Buchwald et al., Surgery 88:507 (1980); Saudek et al., N. Engl. J. Med. 321:574 (1989)). In another embodiment, polymeric materials can be used (see Medical Applications of Controlled Release, Langer and Wise (eds.), CRC Pres., Boca Raton, Fla. (1974); Controlled Drug Bioavailability, Drug Product Design and Performance, Smolen and Ball (eds.), Wiley, New York (1984); Ranger and Peppas, J., Macromol. Sci. Rev. Macromol. Chem. 23:61 (1983); see also Levy et al., Science 228:190 (1985); During et al., Ann. Neurol. 25:351 (1989); Howard et al., J.Neurosurg. 71:105 (1989)). In yet another embodiment, a controlled release system can be placed in proximity of the therapeutic target, e.g., the brain, thus requiring only a fraction of the systemic dose (see, e.g., Goodson, in Medical Applications of Controlled Release, supra, vol. 2, pp. 115-138 (1984)).

[0321] Other controlled release systems are discussed in the review by Langer (Science 249:1527-1533 (1990)).

[0322] In a specific embodiment where the compound of the invention is a nucleic acid encoding a protein, the nucleic acid can be administered in vivo to promote expression of its encoded protein, by constructing it as part of an appropriate nucleic acid expression vector and administering it so that it becomes intracellular, e.g., by use of a retroviral vector (see U.S. Pat. No. 4,980,286), or by direct injection, or by use of microparticle bombardment (e.g., a gene gun; Biolistic, Dupont), or coating with lipids or cell-surface receptors or transfecting agents, or by administering it in linkage to a homeobox-like peptide which is known to enter the nucleus (see e.g., Joliot et al., Proc. Natl. Acad. Sci. USA 88:1864-1868 (1991)), etc. Alternatively, a nucleic acid can be introduced intracellularly and incorporated within host cell DNA for expression, by homologous recombination.

[0323] The present invention also provides pharmaceutical compositions. Such compositions comprise a therapeutically effective amount of a compound, and a pharmaceutically acceptable carrier. In a specific embodiment, the term “pharmaceutically acceptable” means approved by a regulatory agency of the Federal or a state government or listed in the U.S. Pharmacopeia or other generally recognized pharmacopeia for use in animals, and more particularly in humans. The term “carrier” refers to a diluent, adjuvant, excipient, or vehicle with which the therapeutic is administered. Such pharmaceutical carriers can be sterile liquids, such as water and oils, including those of petroleum, animal, vegetable or synthetic origin, such as peanut oil, soybean oil, mineral oil, sesame oil and the like. Water is a preferred carrier when the pharmaceutical composition is administered intravenously. Saline solutions and aqueous dextrose and glycerol solutions can also be employed as liquid carriers, particularly for injectable solutions. Suitable pharmaceutical excipients include starch, glucose, lactose, sucrose, gelatin, malt, rice, flour, chalk, silica gel, sodium stearate, glycerol monostearate, talc, sodium chloride, dried skim milk, glycerol, propylene, glycol, water, ethanol and the like. The composition, if desired, can also contain minor amounts of wetting or emulsifying agents, or pH buffering agents. These compositions can take the form of solutions, suspensions, emulsion, tablets, pills, capsules, powders, sustained-release formulations and the like. The composition can be formulated as a suppository, with traditional binders and carriers such as triglycerides. Oral formulation can include standard carriers such as pharmaceutical grades of mannitol, lactose, starch, magnesium stearate, sodium saccharine, cellulose, magnesium carbonate, etc. Examples of suitable pharmaceutical carriers are described in “Remington's Pharmaceutical Sciences” by E. W. Martin. Such compositions will contain a therapeutically effective amount of the compound, preferably in purified form, together with a suitable amount of carrier so as to provide the form for proper administration to the patient. The formulation should suit the mode of administration.

[0324] In a preferred embodiment, the composition is formulated in accordance with routine procedures as a pharmaceutical composition adapted for intravenous administration to human beings. Typically, compositions for intravenous administration are solutions in sterile isotonic aqueous buffer. Where necessary, the composition may also include a solubilizing agent and a local anesthetic such as lignocaine to ease pain at the site of the injection. Generally, the ingredients are supplied either separately or mixed together in unit dosage form, for example, as a dry lyophilized powder or water free concentrate in a hermetically sealed container such as an ampoule or sachette indicating the quantity of active agent. Where the composition is to be administered by infusion, it can be dispensed with an infusion bottle containing sterile pharmaceutical grade water or saline. Where the composition is administered by injection, an ampoule of sterile water for injection or saline can be provided so that the ingredients may be mixed prior to administration.

[0325] The compounds of the invention can be formulated as neutral or salt forms. Pharmaceutically acceptable salts include those formed with anions such as those derived from hydrochloric, phosphoric, acetic, oxalic, tartaric acids, etc., and those formed with cations such as those derived from sodium, potassium, ammonium, calcium, ferric hydroxides, isopropylamine, triethylamine, 2-ethylamino ethanol, histidine, procaine, etc.

[0326] The amount of the compound of the invention which will be effective in the treatment, inhibition and prevention of a disease or disorder associated with aberrant expression and/or activity of a polypeptide of the invention can be determined by standard clinical techniques. In addition, in vitro assays may optionally be employed to help identify optimal dosage ranges. The precise dose to be employed in the formulation will also depend on the route of administration, and the seriousness of the disease or disorder, and should be decided according to the judgment of the practitioner and each patient's circumstances. Effective doses may be extrapolated from dose-response curves derived from in vitro or animal model test systems.

[0327] For antibodies, the dosage administered to a patient is typically 0.1 mg/kg to 100 mg/kg of the patient's body weight. Preferably, the dosage administered to a patient is between 0.1 mg/kg and 20 mg/kg of the patient's body weight, more preferably 1 mg/kg to 10 mg/kg of the patient's body weight. Generally, human antibodies have a longer half-life within the human body than antibodies from other species due to the immune response to the foreign polypeptides. Thus, lower dosages of human antibodies and less frequent administration is often possible. Further, the dosage and frequency of administration of antibodies of the invention may be reduced by enhancing uptake and tissue penetration (e.g., into the brain) of the antibodies by modifications such as, for example, lipidation.

[0328] The invention also provides a pharmaceutical pack or kit comprising one or more containers filled with one or more of the ingredients of the pharmaceutical compositions of the invention. Optionally associated with such container(s) can be a notice in the form prescribed by a governmental agency regulating the manufacture, use or sale of pharmaceuticals or biological products, which notice reflects approval by the agency of manufacture, use or sale for human administration.

[0329] Diagnosis and Imaging

[0330] Labeled antibodies, and derivatives and analogs thereof, which specifically bind to a polypeptide of interest can be used for diagnostic purposes to detect, diagnose, or monitor diseases, disorders, and/or conditions associated with the aberrant expression and/or activity of a polypeptide of the invention. The invention provides for the detection of aberrant expression of a polypeptide of interest, comprising (a) assaying the expression of the polypeptide of interest in cells or body fluid of an individual using one or more antibodies specific to the polypeptide interest and (b) comparing the level of gene expression with a standard gene expression level, whereby an increase or decrease in the assayed polypeptide gene expression level compared to the standard expression level is indicative of aberrant expression.

[0331] The invention provides a diagnostic assay for diagnosing a disorder, comprising (a) assaying the expression of the polypeptide of interest in cells or body fluid of an individual using one or more antibodies specific to the polypeptide interest and (b) comparing the level of gene expression with a standard gene expression level, whereby an increase or decrease in the assayed polypeptide gene expression level compared to the standard expression level is indicative of a particular disorder. With respect to cancer, the presence of a relatively high amount of transcript in biopsied tissue from an individual may indicate a predisposition for the development of the disease, or may provide a means for detecting the disease prior to the appearance of actual clinical symptoms. A more definitive diagnosis of this type may allow health professionals to employ preventative measures or aggressive treatment earlier thereby preventing the development or further progression of the cancer.

[0332] Antibodies of the invention can be used to assay protein levels in a biological sample using classical immunohistological methods known to those of skill in the art (e.g., see Jalkanen et al., J. Cell. Biol. 101:976-985 (1985); Jalkanen et al., J. Cell. Biol. 105:3087-3096 (1987)). Other antibody-based methods useful for detecting protein gene expression include immunoassays, such as the enzyme linked immunosorbent assay (ELISA) and the radioimmunoassay (RIA). Suitable antibody assay labels are known in the art and include enzyme labels, such as, glucose oxidase; radioisotopes, such as iodine (125I, 121I), carbon (14C), sulfur (35S), tritium (3H), indium (112In), and technetium (99Tc); luminescent labels, such as luminol; and fluorescent labels, such as fluorescein and rhodamine, and biotin.

[0333] One facet of the invention is the detection and diagnosis of a disease or disorder associated with aberrant expression of a polypeptide of interest in an animal, preferably a mammal and most preferably a human. In one embodiment, diagnosis comprises: a) administering (for example, parenterally, subcutaneously, or intraperitoneally) to a subject an effective amount of a labeled molecule which specifically binds to the polypeptide of interest; b) waiting for a time interval following the administering for permitting the labeled molecule to preferentially concentrate at sites in the subject where the polypeptide is expressed (and for unbound labeled molecule to be cleared to background level); c) determining background level; and d) detecting the labeled molecule in the subject, such that detection of labeled molecule above the background level indicates that the subject has a particular disease or disorder associated with aberrant expression of the polypeptide of interest. Background level can be determined by various methods including, comparing the amount of labeled molecule detected to a standard value previously determined for a particular system.

[0334] It will be understood in the art that the size of the subject and the imaging system used will determine the quantity of imaging moiety needed to produce diagnostic images. In the case of a radioisotope moiety, for a human subject, the quantity of radioactivity injected will normally range from about 5 to 20 millicuries of 99mTc. The labeled antibody or antibody fragment will then preferentially accumulate at the location of cells which contain the specific protein. In vivo tumor imaging is described in S. W. Burchiel et al., “Immunopharmacokinetics of Radiolabeled Antibodies and Their Fragments.” (Chapter 13 in Tumor Imaging: The Radiochemical Detection of Cancer, S. W. Burchiel and B. A. Rhodes, eds., Masson Publishing Inc. (1982)).

[0335] Depending on several variables, including the type of label used and the mode of administration, the time interval following the administration for permitting the labeled molecule to preferentially concentrate at sites in the subject and for unbound labeled molecule to be cleared to background level is 6 to 48 hours or 6 to 24 hours or 6 to 12 hours. In another embodiment the time interval following administration is 5 to 20 days or 5 to 10 days.

[0336] In an embodiment, monitoring of the disease or disorder is carried out by repeating the method for diagnosing the disease or disease, for example, one month after initial diagnosis, six months after initial diagnosis, one year after initial diagnosis, etc.

[0337] Presence of the labeled molecule can be detected in the patient using methods known in the art for in vivo scanning. These methods depend upon the type of label used. Skilled artisans will be able to determine the appropriate method for detecting a particular label. Methods and devices that may be used in the diagnostic methods of the invention include, but are not limited to, computed tomography (CT), whole body scan such as position emission tomography (PET), magnetic resonance imaging (MRI), and sonography.

[0338] In a specific embodiment, the molecule is labeled with a radioisotope and is detected in the patient using a radiation responsive surgical instrument (Thurston et al., U.S. Pat. No. 5,441,050). In another embodiment, the molecule is labeled with a fluorescent compound and is detected in the patient using a fluorescence responsive scanning instrument. In another embodiment, the molecule is labeled with a positron emitting metal and is detected in the patent using positron emission-tomography. In yet another embodiment, the molecule is labeled with a paramagnetic label and is detected in a patient using magnetic resonance imaging (MR1).

[0339] Kits

[0340] The present invention provides kits that can be used in the above methods. In one embodiment, a kit comprises an antibody of the invention, preferably a purified antibody, in one or more containers. In a specific embodiment, the kits of the present invention contain a substantially isolated polypeptide comprising an epitope which is specifically immunoreactive with an antibody included in the kit. Preferably, the kits of the present invention further comprise a control antibody which does not react with the polypeptide of interest. In another specific embodiment, the kits of the present invention contain a means for detecting the binding of an antibody to a polypeptide of interest (e.g., the antibody may be conjugated to a detectable substrate such as a fluorescent compound, an enzymatic substrate, a radioactive compound or a luminescent compound, or a second antibody which recognizes the first antibody may be conjugated to a detectable substrate).

[0341] In another specific embodiment of the present invention, the kit is a diagnostic kit for use in screening serum containing antibodies specific against proliferative and/or cancerous polynucleotides and polypeptides. Such a kit may include a control antibody that does not react with the polypeptide of interest. Such a kit may include a substantially isolated polypeptide antigen comprising an epitope which is specifically immunoreactive with at least one anti-polypeptide antigen antibody. Further, such a kit includes means for detecting the binding of said antibody to the antigen (e.g., the antibody may be conjugated to a fluorescent compound such as fluorescein or rhodamine which can be detected by flow cytometry). In specific embodiments, the kit may include a recombinantly produced or chemically synthesized polypeptide antigen. The polypeptide antigen of the kit may also be attached to a solid support.

[0342] In a more specific embodiment the detecting means of the above-described kit includes a solid support to which said polypeptide antigen is attached. Such a kit may also include a non-attached reporter-labeled anti-human antibody. In this embodiment, binding of the antibody to the polypeptide antigen can be detected by binding of the said reporter-labeled antibody.

[0343] In an additional embodiment, the invention includes a diagnostic kit for use in screening serum containing antigens of the polypeptide of the invention. The diagnostic kit includes a substantially isolated antibody specifically immunoreactive with polypeptide or polynucleotide antigens, and means for detecting the binding of the polynucleotide or polypeptide antigen to the antibody. In one embodiment, the antibody is attached to a solid support. In a specific embodiment, the antibody may be a monoclonal antibody. The detecting means of the kit may include a second, labeled monoclonal antibody. Alternatively, or in addition, the detecting means may include a labeled, competing antigen.

[0344] In one diagnostic configuration, test serum is reacted with a solid phase reagent having a surface-bound antigen obtained by the methods of the present invention. After binding with specific antigen antibody to the reagent and removing unbound serum components by washing, the reagent is reacted with reporter-labeled anti-human antibody to bind reporter to the reagent in proportion to the amount of bound anti-antigen antibody on the solid support. The reagent is again washed to remove unbound labeled antibody, and the amount of reporter associated with the reagent is determined. Typically, the reporter is an enzyme which is detected by incubating the solid phase in the presence of a suitable fluorometric, luminescent or calorimetric substrate (Sigma, St. Louis, Mo.).

[0345] The solid surface reagent in the above assay is prepared by known techniques for attaching protein material to solid support material, such as polymeric beads, dip sticks, 96-well plate or filter material. These attachment methods generally include non-specific adsorption of the protein to the support or covalent attachment of the protein, typically through a free amine group, to a chemically reactive group on the solid support, such as an activated carboxyl, hydroxyl, or aldehyde group. Alternatively, streptavidin coated plates can be used in conjunction with biotinylated antigen(s).

[0346] Thus, the invention provides an assay system or kit for carrying out this diagnostic method. The kit generally includes a support with surface-bound recombinant antigens, and a reporter-labeled anti-human antibody for detecting surface-bound anti-antigen antibody.

[0347] Uses of the Polynucleotides

[0348] Each of the polynucleotides identified herein can be used in numerous ways as reagents. The following description should be considered exemplary and utilizes known techniques.

[0349] The polynucleotides of the present invention are useful for chromosome identification. There exists an ongoing need to identify new chromosome markers, since few chromosome marking reagents, based on actual sequence data (repeat polymorphisms), are presently available. Each sequence is specifically targeted to and can hybridize with a particular location on an individual human chromosome, thus each polynucleotide of the present invention can routinely be used as a chromosome marker using techniques known in the art. Table 1A, column 9 provides the chromosome location of some of the polynucleotides of the invention.

[0350] Briefly, sequences can be mapped to chromosomes by preparing PCR primers (preferably at least 15 bp (e.g., 15-25 bp) from the sequences shown in SEQ ID NO:X. Primers can optionally be selected using computer analysis so that primers do not span more than one predicted exon in the genomic DNA. These primers are then used for PCR screening of somatic cell hybrids containing individual human chromosomes. Only those hybrids containing the human gene corresponding to SEQ ID NO:X will yield an amplified fragment.

[0351] Similarly, somatic hybrids provide a rapid method of PCR mapping the polynucleotides to particular chromosomes. Three or more clones can be assigned per day using a single thermal cycler. Moreover, sublocalization of the polynucleotides can be achieved with panels of specific chromosome fragments. Other gene mapping strategies that can be used include in situ hybridization, prescreening with labeled flow-sorted chromosomes, preselection by hybridization to construct chromosome specific-cDNA libraries, and computer mapping techniques (See, e.g., Shuler, Trends Biotechnol 16:456-459 (1998) which is hereby incorporated by reference in its entirety).

[0352] Precise chromosomal location of the polynucleotides can also be achieved using fluorescence in situ hybridization (FISH) of a metaphase chromosomal spread. This technique uses polynucleotides as short as 500 or 600 bases; however, polynucleotides 2,000-4,000 bp are preferred. For a review of this technique, see Verma et al., “Human Chromosomes: a Manual of Basic Techniques,” Pergamon Press, New York (1988).

[0353] For chromosome mapping, the polynucleotides can be used individually (to mark a single chromosome or a single site on that chromosome) or in panels (for marking multiple sites and/or multiple chromosomes).

[0354] Thus, the present invention also provides a method for chromosomal localization which involves (a) preparing PCR primers from the polynucleotide sequences in Table 1A and/or Table 2 and SEQ ID NO:X and (b) screening somatic cell hybrids containing individual chromosomes.

[0355] The polynucleotides of the present invention would likewise be useful for radiation hybrid mapping, HAPPY mapping, and long range restriction mapping. For a review of these techniques and others known in the art, see, e.g. Dear, “Genome Mapping: A Practical Approach,” IRL Press at Oxford University Press, London (1997); Aydin, J. Mol. Med. 77:691-694 (1999); Hacia et al., Mol. Psychiatry 3:483-492 (1998); Herrick et al., Chromosome Res. 7:409-423 (1999); Hamilton et al., Methods Cell Biol. 62:265-280 (2000); and/or Ott, J. Hered. 90:68-70 (1999) each of which is hereby incorporated by reference in its entirety.

[0356] Once a polynucleotide has been mapped to a precise chromosomal location, the physical position of the polynucleotide can be used in linkage analysis. Linkage analysis establishes coinheritance between a chromosomal location and presentation of a particular disease. (Disease mapping data are found, for example, in V. McKusick, Mendelian Inheritance in Man (available on line through Johns Hopkins University Welch Medical Library)). Column 10 of Table 1A provides an OMIM reference identification number of diseases associated with the cytologic band disclosed in column 9 of Table 1A, as determined using techniques described herein and by reference to Table 5. Assuming 1 megabase mapping resolution and one gene per 20 kb, a cDNA precisely localized to a chromosomal region associated with the disease could be one of 50-500 potential causative genes.

[0357] Thus, once coinheritance is established, differences in a polynucleotide of the invention and the corresponding gene between affected and unaffected individuals can be examined. First, visible structural alterations in the chromosomes, such as deletions or translocations, are examined in chromosome spreads or by PCR. If no structural alterations exist, the presence of point mutations are ascertained. Mutations observed in some or all affected individuals, but not in normal individuals,-indicates that the mutation may cause the disease. However, complete sequencing of the polypeptide and the corresponding gene from several normal individuals is required to distinguish the mutation from a polymorphism. If a new polymorphism is identified, this polymorphic polypeptide can be used for further linkage analysis.

[0358] Furthermore, increased or decreased expression of the gene in affected individuals as compared to unaffected individuals can be assessed using the polynucleotides of the invention. Any of these alterations (altered expression, chromosomal rearrangement, or mutation) can be used as a diagnostic or prognostic marker. Diagnostic and prognostic methods, kits and reagents encompassed by the present invention are briefly described below and more thoroughly elsewhere herein (see e.g., the sections labeled “Antibodies”, “Diagnostic Assays”, and “Methods for Detecting Diseases”).

[0359] Thus, the invention also provides a diagnostic method useful during diagnosis of a disorder, involving measuring the expression level of polynucleotides of the present invention in cells or body fluid from an individual and comparing the measured gene expression level with a standard level of polynucleotide expression level, whereby an increase or decrease in the gene expression level compared to the standard is indicative of a disorder. Additional non-limiting examples of diagnostic methods encompassed by the present invention are more thoroughly described elsewhere herein (see, e.g., Example 12).

[0360] In still another embodiment, the invention includes a kit for analyzing samples for the presence of proliferative and/or cancerous polynucleotides derived from a test subject. In a general embodiment, the kit includes at least one polynucleotide probe containing a nucleotide sequence that will specifically hybridize with a polynucleotide of the invention and a suitable container. In a specific embodiment, the kit includes two polynucleotide probes defining an internal region of the polynucleotide of the invention, where each probe has one strand containing a 31′mer-end internal to the region. In a further embodiment, the probes may be useful as primers for polymerase chain reaction amplification.

[0361] Where a diagnosis of a related disorder, including, for example, diagnosis of a tumor, has already been made according to conventional methods, the present invention is useful as a prognostic indicator, whereby patients exhibiting enhanced or depressed polynucleotide of the invention expression will experience a worse clinical outcome relative to patients expressing the gene at a level nearer the standard level.

[0362] By “measuring the expression level of polynucleotides of the invention” is intended qualitatively or quantitatively measuring or estimating the level of the polypeptide of the invention or the level of the mRNA encoding the polypeptide of the invention in a first biological sample either directly (e.g., by determining or estimating absolute protein level or mRNA level) or relatively (e.g., by comparing to the polypeptide level or mRNA level in a second biological sample). Preferably, the polypeptide level or mRNA level in the first biological sample is measured or estimated and compared to a standard polypeptide level or mRNA level, the standard being taken from a second biological sample obtained from an individual not having the related disorder or being determined by averaging levels from a population of individuals not having a related disorder. As will be appreciated in the art, once a standard polypeptide level or mRNA level is known, it can be used repeatedly as a standard for comparison.

[0363] By “biological sample” is intended any biological sample obtained from an individual, body fluid, cell line, tissue culture, or other source which contains polypeptide of the present invention or the corresponding mRNA. As indicated, biological samples include body fluids (such as semen, lymph, vaginal pool, sera, plasma, urine, synovial fluid and spinal fluid) which contain the polypeptide of the present. invention, and tissue sources found to express the polypeptide of the present invention. Methods for obtaining tissue biopsies and body fluids from mammals are well known in the art. Where the biological sample is to include mRNA, a tissue biopsy is the preferred source.

[0364] The method(s) provided above may preferably be applied in a diagnostic method and/or kits in which polynucleotides and/or polypeptides of the invention are attached to a solid support. In one exemplary method, the support may be a “gene chip” or a “biological chip” as described in U.S. Pat. Nos. 5,837,832, 5,874,219, and 5,856,174. Further, such a gene chip with polynucleotides of the invention attached may be used to identify polymorphisms between the isolated polynucleotide sequences of the invention, with polynucleotides isolated from a test subject. The knowledge of such polymorphisms (i.e. their location, as well as, their existence) would be beneficial in identifying disease loci for many disorders, such as for example, in neural disorders, immune system disorders, muscular disorders, reproductive disorders, gastrointestinal disorders, pulmonary disorders, digestive disorders, metabolic disorders, cardiovascular disorders, renal disorders, proliferative disorders, and/or cancerous diseases and conditions. Such a method is described in U.S. Pat. Nos. 5,858,659 and 5,856,104. The US Patents referenced slipra are hereby incorporated by reference in their entirety herein.

[0365] The present invention encompasses polynucleotides of the present invention that are chemically synthesized, or reproduced as peptide nucleic acids (PNA), or according to other methods known in the art. The use of PNAs would serve as the preferred form if the polynucleotides of the invention are incorporated onto a solid support, or gene chip. For the purposes of the present invention, a peptide nucleic acid (PNA) is a polyamide type of DNA analog and the monomeric units for adenine, guanine, thymine and cytosine are available commercially (Perceptive Biosystems). Certain components of DNA, such as phosphorus, phosphorus oxides, or deoxyribose derivatives, are not present in PNAs. As disclosed by Nielsen et al., Science 254, 1497 (1991); and Egholm et al., Nature 365, 666 (1993), PNAs bind specifically and tightly to complementary DNA strands and are not degraded by nucleases. In fact, PNA binds more strongly to DNA than DNA itself does. This is probably because there is no electrostatic repulsion between the two strands, and also the polyamide backbone is more flexible. Because of this, PNA/DNA duplexes bind under a wider range of stringency conditions than DNA/DNA duplexes, making it easier to perform multiplex hybridization. Smaller probes can be used than with DNA due to the strong binding. In addition, it is more likely that single base mismatches can be determined with PNA/DNA hybridization because a single mismatch in a PNA/DNA 15-mer lowers the melting point (T.sub.m) by 8°-20° C., vs. 4°-16° C. for the DNA/DNA 15-mer duplex. Also, the absence of charge groups in PNA means that hybridization can be done at low ionic strengths and reduce possible interference by salt during the analysis.

[0366] The compounds of the present invention have uses which include, but are not limited to, detecting cancer in mammals. In particular the invention is useful during diagnosis of pathological cell proliferative neoplasias which include, but are not limited to: acute myelogenous leukemias including acute monocytic leukemia, acute myeloblastic leukemia, acute promyelocytic leukemia, acute myelomonocytic leukemia, acute erythroleukemia, acute megakaryocytic leukemia, and acute undifferentiated leukemia, etc.; and chronic myelogenous leukemias including chronic myclomonocytic leukemia, chronic granulocytic leukemia, etc. Preferred mammals include monkeys, apes, cats, dogs, cows, pigs, horses, rabbits and humans. Particularly preferred are humans.

[0367] Pathological cell proliferative disorders are often associated with inappropriate activation of proto-oncogenes. (Gelmann, E. P. et al., “The Etiology of Acute Leukemia: Molecular Genetics and Viral Oncology,” in Neoplastic Diseases of the Blood, Vol 1., Wiernik, P. H. et al. eds., 161-182 (1985)). Neoplasias are now believed to result from the qualitative alteration of a normal cellular gene product, or from the quantitative modification of gene expression by insertion into the chromosome of a viral sequence, by chromosomal translocation of a gene to a more actively transcribed region, or by some other mechanism. (Gelmann et al., supra) It is likely that mutated or altered expression of specific genes is involved in the pathogenesis of some leukemias, among other tissues and cell types. (Gelmann et al., supra) Indeed, the human counterparts of the oncogenes involved in some animal neoplasias have been amplified or translocated in some cases of human leukemia and carcinoma. (Gelmann et al., supra)

[0368] For example, c-myc expression is highly amplified in the non-lymphocytic leukemia cell line HL-60. When HL-60 cells are chemically induced to stop proliferation, the level of c-myc is found to be downregulated. (International Publication Number WO 91/15580). However, it has been shown that exposure of HL-60 cells to a DNA construct that is complementary to the 5′ end of c-myc or c-myb blocks translation of the corresponding mRNAs which downregulates expression of the c-myc or c-myb proteins and causes arrest of cell proliferation and differentiation of the treated cells. (International Publication Number WO 91/15580; Wickstrom et al., Proc. Natl. Acad. Sci. 85:1028 (1988); Anfossi et al., Proc. Natl. Acad. Sci. 86:3379 (1989)). However, the skilled artisan would appreciate the present invention's usefulness is not be limited to treatment, prevention, and/or prognosis of proliferative disorders of cells and tissues of hematopoietic origin, in light of the numerous cells and cell types of varying origins which are known to exhibit proliferative phenotypes.

[0369] In addition to the foregoing, a polynucleotide of the present invention can be used to control gene expression through triple helix formation or through antisense DNA or RNA. Antisense techniques are discussed, for example, in Okano, J. Neurochem. 56: 560 (1991); “Oligodeoxynucleotides as Antisense Inhibitors of Gene Expression, CRC Press, Boca Raton, Fla. (1988). Triple helix formation is discussed in, for instance Lee et al., Nucleic Acids Research 6: 3073 (1979); Cooney et al., Science 241: 456 (1988); and Dervan et al., Science 251: 1360 (1991). Both methods rely on binding of the polynucleotide to a complementary DNA or RNA. For these techniques, preferred polynucleotides are usually,oligonucleotides 20 to 40 bases in length and complementary to either the region of the gene involved in transcription (triple helix—see Lee et al., Nucl. Acids Res. 6:3073 (1979); Cooney et al., Science 241:456 (1988); and Dervan et al., Science 251:1360 (1991)) or to the mRNA itself (antisense—Okano, J. Neurochem. 56:560 (1991); Oligodeoxy-nucleotides as Antisense Inhibitors of Gene Expression, CRC Press, Boca Raton, Fla. (1988)). Triple helix formation optimally results in a shut-off of RNA transcription from DNA, while antisense RNA hybridization blocks translation of an mRNA molecule into polypeptide. The oligonucleotide described above can also be delivered to cells such that the antisense RNA or DNA may be expressed in vivo to inhibit production of polypeptide of the present invention antigens. Both techniques are effective in model systems, and the information disclosed herein can be used to design antisense or triple helix polynucleotides in an effort to treat disease, and in particular, for the treatment of proliferative diseases and/or conditions. Non-limiting antisense and triple helix methods encompassed by the present invention are more thoroughly described elsewhere herein (see, e.g., the section labeled “Antisense and Ribozyme (Antagonists)”).

[0370] Polynucleotides of the present invention are also useful in gene therapy. One goal of gene therapy is to insert a normal gene into an organism having a defective gene, in an effort to correct the genetic defect. The polynucleotides disclosed in the present invention offer a means of targeting such genetic defects in a highly accurate manner. Another goal is to insert a new gene that was not present in the host genome, thereby producing a new trait in the host cell. Additional non-limiting examples of gene therapy methods encompassed by the present invention are more thoroughly described elsewhere herein (see, e.g., the sections labeled “Gene Therapy Methods”, and Examples 16, 17 and 18).

[0371] The polynucleotides are also useful for identifying individuals from minute biological samples. The United States military, for example, is considering the use of restriction fragment length polymorphism (RFLP) for identification of its personnel. In this technique, an individual's genomic DNA is digested with one or more restriction enzymes, and probed on a Southern blot to yield unique bands for identifying personnel. This method does not suffer from the current limitations of “Dog Tags” which can be lost, switched, or stolen, making positive identification difficult. The polynucleotides of the present invention can be used as additional DNA markers for RFLP.

[0372] The polynucleotides of the present invention can also be used as an alternative to RFLP, by determining the actual base-by-base DNA sequence of selected portions of an individual's genome. These sequences can be used to prepare PCR primers for amplifying and isolating such selected DNA, which can then be sequenced. Using this technique, individuals can be identified because each individual will have a unique set of DNA sequences. Once an unique ID database is established for an individual, positive identification of that individual, living or dead, can be made from extremely small tissue samples.

[0373] Forensic biology also benefits from using DNA-based identification techniques as disclosed herein. DNA sequences taken from very small biological samples such as tissues, e.g., hair or skin, or body fluids, e.g., blood, saliva, semen, synovial fluid, amniotic fluid, breast milk, lymph, pulmonary sputum or surfactant, urine, fecal matter, etc., can be amplified using PCR. In one prior art technique, gene sequences amplified from polymorphic loci, such as DQa class II HLA gene, are used in forensic biology to identify individuals. (Erlich, H., PCR Technology, Freeman and Co. (1992)). Once these specific polymorphic loci are amplified, they are digested with one or more restriction enzymes, yielding an identifying set of bands on a Southern blot probed with DNA corresponding to the DQa class II HLA gene. Similarly, polynucleotides of the present invention can be used as polymorphic markers for forensic purposes.

[0374] There is also a need for reagents capable of identifying the source of a particular tissue. Such need arises, for example, in forensics when presented with tissue of unknown origin. Appropriate reagents can comprise, for example, DNA probes or primers prepared from the sequences of the present invention, specific to tissues, including but not limited to those shown in Table 1A. Panels of such reagents can identify tissue by species and/or by organ type. In a similar fashion, these reagents can be used to screen tissue cultures for contamination. Additional non-limiting examples of such uses are further described herein.

[0375] The polynucleotides of the present invention are also useful as hybridization probes for differential identification of the tissue(s) or cell type(s) present in a biological sample. Similarly, polypeptides and antibodies directed to polypeptides of the present invention are useful to provide immunological probes for differential identification of the tissue(s) (e.g., immunohistochemistry assays) or cell type(s) (e.g., immunocytochemistry assays). In addition, for a number of disorders of the above tissues or cells, significantly higher or lower levels of gene expression of the polynucleotides/polypeptides of the present invention may be detected in certain tissues (e.g., tissues expressing polypeptides and/or polynucleotides of the present invention, for example, those disclosed in column 8 of Table 1A, and/or cancerous and/or wounded tissues) or bodily fluids (e.g., semen, lymph, vaginal pool, serum, plasma, urine, synovial fluid or spinal fluid) taken from an individual having such a disorder, relative to a “standard” gene expression level, i.e., the expression level in healthy tissue from an individual not having the disorder.

[0376] Thus, the invention provides a diagnostic method of a disorder, which involves: (a) assaying gene expression level in cells or body fluid of an individual; (b) comparing the gene expression level with a standard gene expression level, whereby an increase or decrease in the assayed gene expression level compared to the standard expression level is indicative of a disorder.

[0377] In the very least, the polynucleotides of the present invention can be used as molecular weight markers on Southern gels, as diagnostic probes for the presence of a specific mRNA in a particular cell type, as a probe to “subtract-out” known sequences in the process of discovering novel polynucleotides, for selecting and making oligomers for attachment to a “gene chip” or other support, to raise anti-DNA antibodies using DNA immunization techniques, and as an antigen to elicit an immune response.

[0378] Uses of the Polypeptides

[0379] Each of the polypeptides identified herein can be used in numerous ways. The following description should be considered exemplary and utilizes known techniques.

[0380] Polypeptides and antibodies directed to polypeptides of the present invention are useful to provide immunological probes for differential identification of the tissue(s) (e.g., immunohistochemistry assays such as, for example, ABC immunoperoxidase (Hsu et al., J. Histochem. Cytochem. 29:577-580 (1981)) or cell type(s) (e.g., immunocytochemistry assays).

[0381] Antibodies can be used to assay levels of polypeptides encoded by polynucleotides of the invention in a biological sample using classical immunohistological methods known to those of skill in the art (e.g., see Jalkanen, et al., J. Cell. Biol. 101:976-985 (1985); Jalkanen, et al., J. Cell. Biol. 105:3087-3096 (1987)). Other antibody-based methods useful for detecting protein gene expression include immunoassays, such as the enzyme linked immunosorbent assay (ELISA) and the radioimmunoassay (RIA). Suitable antibody assay labels are known in the art and include enzyme labels, such as, glucose oxidase; radioisotopes, such as iodine (¹³¹I, ¹²⁵I, ¹²³I, ¹²¹I), carbon (¹⁴C), sulfur (³⁵S), tritium (³H), indium (^{115m}In, ^{113m}In, ¹¹²In, ¹¹¹In), and technetium (⁹⁹Tc, ^{99m}Tc), thallium (²⁰¹Ti), gallium (⁶⁸Ga, ⁶⁷Ga), palladium (¹⁰³Pd), molybdenum (⁹⁹Mo), xenon (¹³³Xe), fluorine (¹⁸F), ¹⁵³Sm, ¹⁷⁷Lu, ¹⁵⁹Gd, 149Pm, ¹⁴⁰La, ¹⁷⁵Yb, ¹⁶⁶Ho, ⁹⁰Y, ⁴⁷SC, ¹⁸⁶Re, ¹⁸⁸Re, ¹⁴²Pr, ¹⁰⁵Rh, ⁹⁷Ru; luminescent labels, such as luminol; and fluorescent labels, such as fluorescein and rhodamine, and biotin.

[0382] In addition to assaying levels of polypeptide of the present invention in a biological sample, proteins can also be detected in vivo by imaging. Antibody labels or markers for in vivo imaging of protein include those detectable by X-radiography, NMR or ESR. For X-radiography, suitable labels include radioisotopes such as barium or cesium, which emit detectable radiation but are not overtly harmful to the subject. Suitable markers for NMR and ESR include those with a detectable characteristic spin, such as deuterium, which may be incorporated into the antibody by labeling of nutrients for the relevant hybridoma.

[0383] A protein-specific antibody or antibody fragment which has been labeled with an appropriate detectable imaging moiety, such as a radioisotope (for example, ¹³¹I, ¹¹²In, ^{99m}Tc, (¹³¹I, ¹²⁵I, ¹²³I, ¹²¹I), carbon (¹⁴C), sulfur (³⁵S), tritium (³H), indium (^{115m}In, ^{113m}In, ¹¹²In, ¹¹¹In), and technetium (⁹⁹Tc, ^{99m}Tc), thallium (²⁰¹Ti), gallium (⁶⁸Ga, ⁶⁷Ga), palladium (¹⁰³ Pd), molybdenum (⁹⁹Mo), xenon (¹³³Xe), fluorine (¹⁸F, ¹⁵³Sm, ¹⁷⁷Lu, ¹⁵⁹Gd, ¹⁴⁹Pm, ¹⁴⁰La, ¹⁷⁵Yb, ¹⁶⁶Ho, ⁹⁰Y, ⁴⁷Sc, ¹⁸⁶Re, ¹⁸⁸Re ¹⁴²Pr, ¹⁰⁵Rh, ⁹⁷Ru), a radio-opaque substance, or a material detectable by nuclear magnetic resonance, is introduced (for example, parenterally, subcutaneously or intraperitoneally) into the mammal to be examined for immune system disorder. It will be understood in the art that the size of the subject and the imaging system used will determine the quantity of imaging moiety needed to produce diagnostic images. In the case of a radioisotope moiety, for a human subject, the quantity of radioactivity injected will normally range from about 5 to 20 millicuries of ^{99m}Tc. The labeled antibody or antibody fragment will then preferentially accumulate at the location of cells which express the polypeptide encoded by a polynucleotide of the invention. In vivo tumor imaging is described in S. W. Burchiel et al., “Immunopharmacokinetics of Radiolabeled Antibodies and Their Fragments” (Chapter 13 in Tumor Imaging: The Radiochemical Detection of Cancer, S. W. Burchiel and B. A. Rhodes, eds., Masson Publishing Inc. (1982)).

[0384] In one embodiment, the invention provides a method for the specific delivery of compositions of the invention to cells by administering polypeptides of the invention (e.g., polypeptides encoded by polynucleotides of the invention and/or antibodies) that are associated with heterologous polypeptides or nucleic acids. In one example, the invention provides a method for delivering a therapeutic protein into the targeted cell. In another example, the invention provides a method for delivering a single stranded nucleic acid (e.g., antisense or ribozymes) or double stranded nucleic acid (e.g., DNA that can integrate into the cell's genome or replicate episomally and that can be transcribed) into the targeted cell.

[0385] In another embodiment, the invention provides a method for the specific destruction of cells (e.g., the destruction of tumor cells) by administering polypeptides of the invention in association with toxins or cytotoxic prodrugs.

[0386] By “toxin” is meant one or more compounds that bind and activate endogenous cytotoxic effector systems, radioisotopes, holotoxins, modified toxins, catalytic subunits of toxins, or any molecules or enzymes not normally present in or on the surface of a cell that under defined conditions cause the cell's death. Toxins that may be used according to the methods of the invention include, but are not limited to, radioisotopes known in the art, compounds such as, for example, antibodies (or complement fixing containing portions thereof) that bind an inherent or induced endogenous cytotoxic effector system, thymidine kinase, endonuclease, RNAse, alpha toxin, ricin, abrin, Pseudomonas exotoxin A, diphtheria toxin, saporin, momordin, gelonin, pokeweed antiviral protein, alpha-sarcin and cholera toxin. “Toxin” also includes a cytostatic or cytocidal agent, a therapeutic agent or a radioactive metal ion, e.g., alpha-emitters such as, for example, ²¹³Bi, or other radioisotopes such as, for example, ¹⁰³Pd, ¹³³Xe, ¹³¹I, ⁶⁸Ge, ⁵⁷Co, ⁶⁵Zn, ⁸⁵Sr, ³²P, ³⁵S, ⁹⁰Y, ¹⁵³Sm, ¹⁵³Gd, ¹⁶⁹Yb, ⁵¹Cr, ⁵⁴Mn, ⁷⁵Se, ¹¹³Sn, ⁹⁰ Yttrium, ¹¹⁷Tin, ¹⁸⁶Rhenium, ¹⁶⁶Holmium, and ¹⁸⁸Rhenium; luminescent labels, such as luminol; and fluorescent labels, such as fluorescein and rhodamine, and biotin. In a specific embodiment, the invention provides a method for the specific destruction of cells (e.g., the destruction of tumor cells) by administering polypeptides of the invention or antibodies of the invention in association with the radioisotope ⁹⁰Y. In another specific embodiment, the invention provides a method for the specific destruction of cells (e.g., the destruction of tumor cells) by administering polypeptides of the invention or antibodies of the invention in association with the radioisotope ¹¹¹In. In a further specific embodiment, the invention provides a method for the specific destruction of cells (e.g., the destruction of tumor cells) by administering polypeptides of the invention or antibodies of the invention in association with the radioisotope ¹³¹I.

[0387] Techniques known in the art may be applied to label polypeptides of the invention (including antibodies). Such techniques include, but are not limited to, the use of bifunctional conjugating agents (see e.g., U.S. Pat. Nos. 5,756,065; 5,714,631; 5,696,239; 5,652,361; 5,505,931; 5,489,425; 5,435,990; 5,428,139; 5,342,604; 5,274,119; 4,994,560; and 5,808,003; the contents of each of which are hereby incorporated by reference in its entirety).

[0388] Thus, the invention provides a diagnostic method of a disorder, which involves (a) assaying the expression level of a polypeptide of the present invention in cells or body fluid of an individual; and (b) comparing the assayed polypeptide expression level with a standard polypeptide expression level, whereby an increase or decrease in the assayed polypeptide expression level compared to the standard expression level is indicative of a disorder. With respect to cancer, the presence of a relatively high amount of transcript in biopsied tissue from an individual may indicate a predisposition for the development of the disease, or may provide a means for detecting the disease prior to the appearance of actual clinical symptoms. A more definitive diagnosis of this type may allow health professionals to employ preventative measures or aggressive treatment earlier thereby preventing the development or further progression of the cancer.

[0389] Moreover, polypeptides of the present invention can be used to treat or prevent diseases or conditions such as, for example, neural disorders, immune system disorders, muscular disorders, reproductive disorders, gastrointestinal disorders, pulmonary disorders, cardiovascular disorders, renal disorders, proliferative disorders, and/or cancerous diseases and conditions. For example, patients can be administered a polypeptide of the present invention in an effort to replace absent or decreased levels of the polypeptide (e.g., insulin), to supplement absent or decreased levels of a different polypeptide (e.g., hemoglobin S for hemoglobin B, SOD, catalase, DNA repair proteins), to inhibit the activity of a polypeptide (e.g., an oncogene or tumor supressor), to activate the activity of a polypeptide (e.g., by binding to a receptor), to reduce the activity of a membrane bound receptor by competing with it for free ligand (e.g., soluble TNF receptors used in reducing inflammation), or to bring about a desired response (e.g., blood vessel growth inhibition, enhancement of the immune response to proliferative cells or tissues).

[0390] J Similarly, antibodies directed to a polypeptide of the present invention can also be used to treat disease (as described supra, and elsewhere herein). For example, administration of an antibody directed to a polypeptide of the present invention can bind, and/or neutralize the polypeptide, and/or reduce overproduction of the polypeptide. Similarly, administration of an antibody can activate the polypeptide, such as by binding to a polypeptide bound to a membrane (receptor).

[0391] At the very least, the polypeptides of the present invention can be used as molecular weight markers on SDS-PAGE gels or on molecular sieve gel filtration columns using methods well known to those of skill in the art. Polypeptides can also be used to raise antibodies, which in turn are used to measure protein expression from a recombinant cell, as a way of assessing transformation of the host cell. Moreover, the polypeptides of the present invention can be used to test the biological activities described herein.

[0392] Diagnostic Assays

[0393] The compounds of the present invention are useful for diagnosis, treatment, prevention and/or prognosis of various disorders in mammals, preferably humans. Such disorders include, but are not limited to, those described herein under the section heading “Biological Activities”.

[0394] For a number of disorders, substantially altered (increased or decreased) levels of gene expression can be detected in tissues, cells or bodily fluids (e.g., sera, plasma, urine, semen, synovial fluid or spinal fluid) taken from an individual having such a disorder, relative to a “standard” gene expression level, that is, the expression level in tissues or bodily fluids from an individual not having the disorder. Thus, the invention provides a diagnostic method useful during diagnosis of a disorder, which involves measuring the expression level of the gene encoding the polypeptide in tissues, cells or body fluid from an individual and comparing the measured gene expression level with a standard gene expression level, whereby an increase or decrease in the gene expression level(s) compared to the standard is indicative of a disorder. These diagnostic assays may be performed in vivo or in vitro, such as, for example, on blood samples, biopsy tissue or autopsy tissue.

[0395] The present invention is also useful as a prognostic indicator, whereby patients exhibiting enhanced or depressed gene expression will experience a worse clinical outcome relative to patients expressing the gene at a level nearer the standard level.

[0396] In certain embodiments, a polypeptide of the invention, or polynucleotides, antibodies, agonists, or antagonists corresponding to that polypeptide, may be used to diagnose and/or prognose diseases and/or disorders associated with the tissue(s) in which the polypeptide of the invention is expressed, including one, two, three, four, five, or more tissues disclosed in Table 1A, column 8 (Tissue Distribution Library Code).

[0397] By “assaying the expression level of the gene encoding the polypeptide” is intended qualitatively or quantitatively measuring or estimating the level of the polypeptide of the invention or the level of the mRNA encoding the polypeptide of the invention in a first biological sample either directly (e.g., by determining or estimating absolute protein level or mRNA level) or relatively (e.g., by comparing to the polypeptide level or mRNA level in a second biological sample). Preferably, the polypeptide expression level or mRNA level in the first biological sample is measured or estimated and compared to a standard polypeptide level or mRNA level, the standard being taken from a second biological sample obtained from an individual not having the disorder or being determined by averaging levels from a population of individuals not having the disorder. As will be appreciated in the art, once a standard polypeptide level or mRNA level is known, it can be used repeatedly as a standard for comparison.

[0398] By “biological sample” is intended any biological sample obtained from an individual, cell line, tissue culture, or other source containing polypeptides of the invention (including portions thereof) or mRNA. As indicated, biological samples include body fluids (such as sera, plasma, urine, synovial fluid and spinal fluid) and tissue sources found to express the full length or fragments thereof of a polypeptide or mRNA. Methods for obtaining tissue biopsies and body fluids from mammals are well known in the art. Where the biological sample is to include mRNA, a tissue biopsy is the preferred source.

[0399] Total cellular RNA can be isolated from a biological sample using any suitable technique such as the single-step guanidinium-thiocyanate-phenol-chloroform method described in Chomczynski and Sacchi, Anal. Biochem. 162:156-159 (1987). Levels of mRNA encoding the polypeptides of the invention are then assayed using any appropriate method. These include Northern blot analysis, S1 nuclease mapping, the polymerase chain reaction (PCR), reverse transcription in combination with the polymerase chain reaction (RT-PCR), and reverse transcription in combination with the ligase chain reaction (RT-LCR).

[0400] The present invention also relates to diagnostic assays such as quantitative and diagnostic assays for detecting levels of polypeptides of the invention, in a biological sample (e.g., cells and tissues), including determination of normal and abnormal levels of polypeptides. Thus, for instance, a diagnostic assay in accordance with the invention for detecting over-expression of polypeptides of the invention compared to normal control tissue samples may be used to detect the presence of tumors. Assay techniques that can be used to determine levels of a polypeptide, such as a polypeptide of the present invention in a sample derived from a host are well-known to those of skill in the art. Such assay methods include radioimmunoassays, competitive-binding assays, Western Blot analysis and ELISA assays. Assaying polypeptide levels in a biological sample can occur using any art-known method.

[0401] Assaying polypeptide levels in a biological sample can occur using antibody-based techniques. For example, polypeptide expression in tissues can be studied with classical immunohistological methods (Jalkanen et al., J. Cell. Biol. 101:976-985 (1985); Jalkanen, M., et al., J. Cell. Biol. 105:3087-3096 (1987)). Other antibody-based methods useful for detecting polypeptide gene expression include immunoassays, such as the enzyme linked immunosorbent assay (ELISA) and the radioimmunoassay (RIA). Suitable antibody assay labels are known in the art and include enzyme labels, such as, glucose oxidase, and radioisotopes, such as iodine (¹²⁵I, ¹²¹I), carbon (¹⁴C), sulfur (³⁵S), tritium (³H), indium (¹¹²In), and technetium (⁹⁹ mTc), and fluorescent labels, such as fluorescein and rhodamine, and biotin.

[0402] The tissue or cell type to be analyzed will generally include those which are known, or suspected, to express the gene of inteest (such as, for example, cancer). The protein isolation methods employed herein may, for example, be such as those described in Harlow and Lane (Harlow, E. and Lane, D., 1988, “Antibodies: A Laboratory Manual”, Cold Spring Harbor Laboratory Press, Cold Spring Harbor, N.Y.), which is incorporated herein by reference in its entirety. The isolated cells can be derived from cell culture or from a patient. The analysis of cells taken from culture may be a necessary step in the assessment of cells that could be used as part of a cell-based gene therapy technique or, alternatively, to test the effect of compounds on the expression of the gene.

[0403] For example, antibodies, or fragments of antibodies, such as those described herein, may be used to quantitatively or qualitatively detect the presence of gene products or conserved variants or peptide fragments thereof. This can be accomplished, for example, by immunofluorescence techniques employing a fluorescently labeled antibody coupled with light microscopic, flow cytometric, or fluorimetric detection.

[0404] In a preferred embodiment, antibodies, or fragments of antibodies directed to any one or all of the predicted epitope domains of the polypeptides of the invention (shown in column 7 of Table 1A) may be used to quantitatively or qualitatively detect the presence of gene products or conserved variants or peptide fragments thereof. This can be accomplished, for example, by immunofluorescence techniques employing a fluorescently labeled antibody coupled with light microscopic, flow cytometric, or fluorimetric detection.

[0405] In an additional preferred embodiment, antibodies, or fragments of antibodies directed to a conformational epitope of a polypeptide of the invention may be used to quantitatively or qualitatively detect the presence of gene products or conserved variants or peptide fragments thereof. This can be accomplished, for example, by immunofluorescence techniques employing a fluorescently labeled antibody coupled with light microscopic, flow cytometric, or fluorimetric detection.

[0406] The antibodies (or fragments thereof), and/or polypeptides of the present invention may, additionally, be employed histologically, as in immunofluorescence, immunoelectron microscopy or non-immunological assays, for in situ detection of gene products or conserved variants or peptide fragments thereof. In situ detection may be accomplished by removing a histological specimen from a patient, and applying thereto a labeled antibody or polypeptide of the present invention. The antibody (or fragment thereof) or polypeptide is preferably applied by overlaying the labeled antibody (or fragment) onto a biological sample. Through the use of such a procedure, it is possible to determine not only the presence of the gene product, or conserved variants or peptide fragments, or polypeptide binding, but also its distribution in the examined tissue. Using the present invention, those of ordinary skill will readily perceive that any of a wide variety of histological methods (such as staining procedures) can be modified in order to achieve such in situ detection.

[0407] Immunoassays and non-immunoassays for gene products or conserved variants or peptide fragments thereof will typically comprise incubating a sample, such as a biological fluid, a tissue extract, freshly harvested cells, or lysates of cells which have been incubated in cell culture, in the presence of a detectably labeled antibody capable of binding gene products or conserved variants or peptide fragments thereof, and detecting the bound antibody by any of a number of techniques well-known in the art.

[0408] The biological sample may be brought in contact with and immobilized onto a solid phase support or carrier such as nitrocellulose, or other solid support which is capable of immobilizing cells, cell particles or soluble proteins. The support may then be washed with suitable buffers followed by treatment with the detectably labeled antibody or detectable polypeptide of the invention. The solid phase support may then be washed with the buffer a second time to remove unbound antibody or polypeptide. Optionally the antibody is subsequently labeled. The amount of bound label on solid support may then be detected by conventional means.

[0409] By “solid phase support or carrier” is intended any support capable of binding an antigen or an antibody. Well-known supports or carriers include glass, polystyrene, polypropylene, polyethylene, dextran, nylon, amylases, natural and modified celluloses, polyacrylamides, gabbros, and magnetite. The nature of the carrier can be either soluble to some extent or insoluble for the purposes of the present invention. The support material may have virtually any possible structural configuration so long as the coupled molecule is capable of binding to an antigen or antibody. Thus, the support configuration may be spherical, as in a bead, or cylindrical, as in the inside surface of a test tube, or the external surface of a rod. Alternatively, the surface may be flat such as a sheet, test strip, etc. Preferred supports include polystyrene beads. Those skilled in the art will know many other suitable carriers for binding antibody or antigen, or will be able to ascertain the same by use of routine experimentation.

[0410] The binding activity of a given lot of antibody or antigen polypeptide may be determined according to well known methods. Those skilled in the art will be able to determine operative and optimal assay conditions for each determination by employing routine experimentation.

[0411] In addition to assaying polypeptide levels or polynucleotide levels in a biological sample obtained from an individual, polypeptide or polynucleotide can also be detected in vivo by imaging. For example, in one embodiment of the invention, polypeptides and/or antibodies of the invention are used to image diseased cells, such as neoplasms. In another embodiment, polynucleotides of the invention (e.g., polynucleotides complementary to all or a portion of an mRNA) and/or antibodies (e.g., antibodies directed to any one or a combination of the epitopes of a polypeptide of the invention, antibodies directed to a conformational epitope of a polypeptide of the invention, or antibodies directed to the full length polypeptide expressed on the cell surface of a mammalian cell) are used to image diseased or neoplastic cells.

[0412] Antibody labels or markers for in vivo imaging of polypeptides of the invention include those detectable by X-radiography, NMR, MRI, CAT-scans or ESR. For X-radiography, suitable labels include radioisotopes such as barium or cesium, which emit detectable radiation but are not overtly harmful to the subject. Suitable markers for NMR and ESR include those with a detectable characteristic spin, such as deuterium, which may be incorporated into the antibody by labeling of nutrients for the relevant hybridoma. Where in vivo imaging is used to detect enhanced levels of polypeptides for diagnosis in humans, it may be preferable to use human antibodies or “humanized” chimeric monoclonal antibodies. Such antibodies can be produced using techniques described herein or otherwise known in the art. For example methods for producing chimeric antibodies are known in the art. See, for review, Morrison, Science 229:1202 (1985); Oi et al., BioTechniques 4:214 (1986); Cabilly et al., U.S. Pat. No. 4,816,567; Taniguchi et al., EP 171496; Morrison et al., EP 173494; Neuberger et al., WO 8601533; Robinson et al., WO 8702671; Boulianne et al., Nature 312:643 (1984); Neuberger et al., Nature 314:268 (1985).

[0413] Additionally, any polypeptides of the invention whose presence can be detected, can be administered. For example, polypeptides of the invention labeled with a radio-opaque or other appropriate compound can be administered and visualized in vivo, as discussed, above for labeled antibodies. Further, such polypeptides can be utilized for in vitro diagnostic procedures.

[0414] A polypeptide-specific antibody or antibody fragment which has been labeled with an appropriate detectable imaging moiety, such as a radioisotope (for example, ¹³¹I, ¹¹²In, ^{99m}Tc), a radio-opaque substance, or a material detectable by nuclear magnetic resonance, is introduced (for example, parenterally, subcutaneously or intraperitoneally) into the mammal to be examined for a disorder. It will be understood in the art that the size of the subject and the imaging system used will determine the quantity of imaging moiety needed to produce diagnostic images. In the case of a radioisotope moiety, for a human subject, the quantity of radioactivity injected will normally range from about 5 to 20 millicuries of ^{99m}Tc. The labeled antibody or antibody fragment will then preferentially accumulate at the location of cells which contain the antigenic protein. In vivo tumor imaging is described in S. W. Burchiel et al., “Immunopharmacokinetics of Radiolabeled Antibodies and Their Fragments” (Chapter 13 in Tumor Imaging: The Radiochemical Detection of Cancer, S. W. Burchiel and B. A. Rhodes, eds., Masson Publishing Inc. (1982)).

[0415] With respect to antibodies, one of the ways in which an antibody of the present invention can be detectably labeled is by linking the same to a reporter enzyme and using the linked product in an enzyme immunoassay (EIA) (Voller, A., “The Enzyme Linked Immunosorbent Assay (ELISA)”, 1978, Diagnostic Horizons 2:1-7, Microbiological Associates Quarterly Publication, Walkersville, Md.); Voller et al., J. Clin. Pathol. 31:507-520 (1978); Butler, J. E., Meth. Enzymol. 73:482-523 (1981); Maggio, E. (ed.), 1980, Enzyme Immunoassay, CRC Press, Boca Raton, Fla.,; Ishikawa, E. et al., (eds.), 1981, Enzyme Immunoassay, Kgaku Shoin, Tokyo). The reporter enzyme which is bound to the antibody will react with an appropriate substrate, preferably a chromogenic substrate, in such a manner as to produce a chemical moiety which can be detected, for example, by spectrophotometric, fluorimetric or by visual means. Reporter enzymes which can be used to detectably label the antibody include, but are not limited to, malate dehydrogenase, staphylococcal nuclease, delta-5-steroid isomerase, yeast alcohol dehydrogenase, alpha-glycerophosphate, dehydrogenase, triose phosphate isomerase, horseradish peroxidase, alkaline phosphatase, asparaginase, glucose oxidase, beta-galactosidase, ribonuclease, urease, catalase, glucose-6-phosphate dehydrogenase, glucoamylase and acetylcholinesterase. Additionally, the detection can be accomplished by colorimetric methods which employ a chromogenic substrate for the reporter enzyme. Detection may also be accomplished by visual comparison of the extent of enzymatic reaction of a substrate in comparison with similarly prepared standards.

[0416] Detection may also be accomplished using any of a variety of other immunoassays. For example, by radioactively labeling the antibodies or antibody fragments, it is possible to detect polypeptides through the use of a radioimmunoassay (RIA) (see, for example, Weintraub, B., Principles of Radioimmunoassays, Seventh Training Course on Radioligand Assay Techniques, The Endocrine Society, March, 1986, which is incorporated by reference herein). The radioactive isotope can be detected by means including, but not limited to, a gamma counter, a scintillation counter, or autoradiography.

[0417] It is also possible to label the antibody with a fluorescent compound. When the fluorescently labeled antibody is exposed to light of the proper wave length, its presence can then be detected due to fluorescence. Among the most commonly used fluorescent labeling compounds are fluorescein isothiocyanate, rhodamine, phycoerythrin, phycocyanin, allophycocyanin, ophthaldehyde and fluorescamine.

[0418] The antibody can also be detectably labeled using fluorescence emitting metals such as ¹⁵²Eu, or others of the lanthamide series. These metals can be attached to the antibody using such metal chelating groups as diethylenetriaminepentacetic acid (DTPA) or ethylenediaminetetraacetic acid (EDTA).

[0419] The antibody also can be detectably labeled by coupling it to a chemiluminescent compound. The presence of the chemiluminescent-tagged antibody is then determined by detecting the presence of luminescence that arises during the course of a chemical reaction. Examples of particularly useful chemiluminescent labeling compounds are luminol, isoluminol, theromatic acridinium ester, imidazole, acridinium salt and oxalate ester.

[0420] Likewise, a bioluminescent compound may be used to label the antibody of the present invention. Bioluminescence is a type of chemiluminescence found in biological systems in, which a catalytic protein increases the efficiency of the chemiluminescent reaction. The presence of a bioluminescent protein is determined by detecting the presence of luminescence. Important bioluminescent compounds for purposes of labeling are luciferin, luciferase and aequorin.

[0421] Methods for Detecting Diseases

[0422] In general, a disease may be detected in a patient based on the presence of one or more proteins of the invention and/or polynucleotides encoding such proteins in a biological sample (for example, blood, sera, urine, and/or tumor biopsies) obtained from the patient. In other words, such proteins may be used as markers to indicate the presence or absence of a disease or disorder, including cancer and/or as described elsewhere herein. In addition, such proteins may be useful for the detection of other diseases and cancers. The binding agents provided herein generally permit detection of the level of antigen that binds to the agent in the biological sample. Polynucleotide primers and probes may be used to detect the level of mRNA encoding polypeptides of the invention, which is also indicative of the presence or absence of a disease or disorder, including cancer. In general, polypeptides of the invention should be present at a level that is at least three fold higher in diseased tissue than in normal tissue.

[0423] There are a variety of assay formats known to those of ordinary skill in the art for using a binding agent to detect polypeptide markers in a sample. See, e.g., Harlow and Lane, supra. In general, the presence or absence of a disease in a patient may be determined by (a) contacting a biological sample obtained from a patient with a binding agent; (b) detecting in the sample a level of polypeptide that binds to the binding agent; and (c) comparing the level of polypeptide with a predetermined cut-off value.

[0424] In a preferred embodiment, the assay involves the use of a binding agent(s) immobilized on a solid support to bind to and remove the polypeptide of the invention from the remainder of the sample. The bound polypeptide may then be detected using a detection reagent that contains a reporter group and specifically binds to the binding agent/polypeptide complex. Such detection reagents may comprise, for example, a binding agent that specifically binds to the polypeptide or an antibody or other agent that specifically binds to the binding agent, such as an anti-immunoglobulin, protein G, protein A or a lectin. Alternatively, a competitive assay may be utilized, in which a polypeptide is labeled with a reporter group and allowed to bind to the immobilized binding agent after incubation of the binding agent with the sample. The extent to which components of the sample inhibit the binding of the labeled polypeptide to the binding agent is indicative of the reactivity of the sample with the immobilized binding agent. Suitable polypeptides for use within such assays include polypeptides of the invention and portions thereof, or antibodies, to which the binding agent binds, as described above.

[0425] The solid support may be any material known to those of skill in the art to which polypeptides of the invention may be attached. For example, the solid support may be a test well in a microtiter plate or a nitrocellulose or other suitable membrane. Alternatively, the support may be a bead or disc, such as glass fiberglass, latex or a plastic material such as polystyrene or polyvinylchloride. The support may also be a magnetic particle or a fiber optic sensor, such as those disclosed, for example, in U.S. Pat. No. 5,359,681. The binding agent may be immobilized on the solid support using a variety of techniques known to those of skill in the art, which are amply described in the patent and scientific literature. In the context of the present invention, the term “immobilization” refers to both noncovalent association, such as adsorption, and covalent attachment (which may be a direct linkage between the agent and functional groups on the support or may be a linkage by way of a cross-linking agent). Immobilization by adsorption to a well in a microtiter plate or to a membrane is preferred. In such cases, adsorption may be achieved by contacting the binding agent, in a suitable buffer, with the solid support for the suitable amount of time. The contact time varies with temperature, but is typically between about 1 hour and about 1 day. In general, contacting a well of plastic microtiter plate (such as polystyrene or polyvinylchloride) with an amount of binding agent ranging from about 10 ng to about 10 ug, and preferably about 100 ng to about 1 ug, is sufficient to immobilize an adequate amount of binding agent.

[0426] Covalent attachment of binding agent to a solid support may generally be achieved by first reacting the support with a bifunctional reagent that will react with both the support and a functional group, such as a hydroxyl or amino group, on the binding agent. For example, the binding agent may be covalently attached to supports having an appropriate polymer coating using benzoquinone or by condensation of an aldehyde group on the support with an amine and an active hydrogen on the binding partner (see, e.g., Pierce Immunotechnology Catalog and Handbook, 1991, at A12-A13).

[0427] Gene Therapy Methods

[0428] Also encompassed by the invention are gene therapy methods for treating or preventing disorders, diseases and conditions. The gene therapy methods relate to the introduction of nucleic acid (DNA, RNA and antisense DNA or RNA) sequences into an animal to achieve expression of the polypeptide of the present invention. This method requires a polynucleotide which codes for a polypeptide of the present invention operatively linked to a promoter and any other genetic elements necessary for the expression of the polypeptide by the target tissue. Such gene therapy and delivery techniques are known in the art, see, for example, WO90/11092, which is herein incorporated by reference.

[0429] Thus, for example, cells from a patient may be engineered with a polynucleotide (DNA or RNA) comprising a promoter operably linked to a polynucleotide of the present invention ex vivo, with the engineered cells then being provided to a patient to be treated with the polypeptide of the present invention. Such methods are well-known in the art. For example, see Belldegrun, A., et al., J. Natl. Cancer Inst. 85: 207-216 (1993); Ferrantini, M. et al., Cancer Research 53: 1107-1112 (1993); Ferrantini, M. et al., J. Immunology 153: 4604-4615 (1994); Kaido, T., et al., Int. J. Cancer 60: 221-229 (1995); Ogura, H., et al., Cancer Research 50: 5102-5106 (1990); Santodonato, L., et al., Human Gene Therapy 7: 1-10 (1996); Santodonato, L., et al., Gene Therapy 4:1246-1255 (1997); and Zhang, J.-F. et al., Cancer Gene Therapy 3: 31-38 (1996)), which are herein incorporated by reference. In one embodiment, the cells which are engineered are arterial cells. The arterial cells may be reintroduced into the patient through direct injection to the artery, the tissues surrounding the artery, or through catheter injection.

[0430] As discussed in more detail below, the polynucleotide constructs can be delivered by any method that delivers injectable materials to the cells of an animal, such as, injection into the interstitial space of tissues (heart, muscle, skin, lung, liver, and the like). The polynucleotide constructs may be delivered in a pharmaceutically acceptable liquid or aqueous carrier.

[0431] In one embodiment, the polynucleotide of the present invention is delivered as a naked polynucleotide. The term “naked” polynucleotide, DNA or RNA refers to sequences that are free from any delivery vehicle that acts to assist, promote or facilitate entry into the cell, including viral sequences, viral particles, liposome formulations, lipofectin or precipitating agents and the like. However, the polynucleotide of the present invention can also be delivered in liposome formulations and lipofectin formulations and the like can be prepared by methods well known to those skilled in the art. Such methods are described, for example, in U.S. Pat. Nos. 5,593,972, 5,589,466, and 5,580,859, which are herein incorporated by reference.

[0432] The polynucleotide vector constructs used in the gene therapy method are preferably constructs that will not integrate into the host genome nor will they contain sequences that allow for replication. Appropriate vectors include pWLNEO, pSV2CAT, pOG44, pXT1 and pSG available from Stratagene; pSVK3, pBPV, pMSG and pSVL available from Pharmacia; and pEF1/V5, pcDNA3.1, and pRc/CMV2 available from Invitrogen. Other suitable vectors will be readily apparent to the skilled artisan.

[0433] Any strong promoter known to those skilled in the art can be used for driving the expression of the polynucleotide sequence. Suitable promoters include adenoviral promoters, such as the adenoviral major late promoter; or heterologous promoters, such as the cytomegalovirus (CMV) promoter; the respiratory syncytial virus (RSV) promoter; inducible promoters, such as the MMT promoter, the metallothionein promoter; heat shock promoters; the albumin promoter; the ApoAI promoter; human globin promoters; viral thymidine kinase promoters, such as the Herpes Simplex thymidine kinase promoter; retroviral LTRs; the b-actin promoter; and human growth hormone promoters. The promoter also may be the native promoter for the polynucleotide of the present invention.

[0434] Unlike other gene therapy techniques, one major advantage of introducing naked nucleic acid sequences into target cells is the transitory nature of the polynucleotide synthesis in the cells. Studies have shown that non-replicating DNA sequences—can be introduced into cells to provide production of the desired polypeptide for periods of up to six months.

[0435] The polynucleotide construct can be delivered to the interstitial space of tissues within the an animal, including of muscle, skin, brain, lung, liver, spleen, bone marrow, thymus, heart, lymph, blood, bone, cartilage, pancreas, kidney, gall bladder, stomach, intestine, testis, ovary, uterus, rectum, nervous system, eye, gland, and connective tissue. Interstitial space of the tissues comprises the intercellular, fluid, mucopolysaccharide matrix among the reticular fibers of organ tissues, elastic fibers in the walls of vessels or chambers, collagen fibers of fibrous tissues, or that same matrix within connective tissue ensheathing muscle cells or in the lacunae of bone. It is similarly the space occupied by the plasma of the circulation and the lymph fluid of the lymphatic channels. Delivery to the interstitial space of muscle tissue is preferred for the reasons discussed below. They may be conveniently delivered by injection into the tissues comprising these cells. They are preferably delivered to and expressed in persistent, non-dividing cells which are differentiated, although delivery and expression may be achieved in non-differentiated or less completely differentiated cells, such as, for example, stem cells of blood or skin fibroblasts. In vivo muscle cells are particularly competent in their ability to take up and express polynucleotides.

[0436] For the naked nucleic acid sequence injection, an effective dosage amount of DNA or RNA will be in the range of from about 0.05 mg/kg body weight to about 50 mg/kg body weight. Preferably the dosage will be from about 0.005 mg/kg to about 20 mg/kg and more preferably from about 0.05 mg/kg to about 5 mg/kg. Of course, as the artisan of ordinary skill will appreciate, this dosage will vary according to the tissue site of injection. The appropriate and effective dosage of nucleic acid sequence can readily be determined by those of ordinary skill in the art and may depend on the condition being treated and the route of administration.

[0437] The preferred route of administration is by the parenteral route of injection into the interstitial space of tissues. However, other parenteral routes may also be used, such as, inhalation of an aerosol formulation particularly for delivery to lungs or bronchial tissues, throat or mucous membranes of the nose. In addition, naked DNA constructs can be delivered to arteries during angioplasty by the catheter used in the procedure.

[0438] The naked polynucleotides are delivered by any method known in the art, including, but not limited to, direct needle injection at the delivery site, intravenous injection, topical administration, catheter infusion, and so-called “gene guns”. These delivery methods are known in the art.

[0439] The constructs may also be delivered with delivery vehicles such as viral sequences, viral particles, liposome formulations, lipofectin, precipitating agents, etc. Such methods of delivery are known in the art.

[0440] In certain embodiments, the polynucleotide constructs are complexed in a liposome preparation. Liposomal preparations for use in the instant invention include cationic (positively charged), anionic (negatively charged) and neutral preparations. However, cationic liposomes are particularly preferred because a tight charge complex can be formed between the cationic liposome and the polyanionic nucleic acid. Cationic liposomes have been shown to mediate intracellular delivery of plasmid DNA (Felgner et al., Proc. Natl. Acad. Sci. USA (1987) 84:7413-7416, which is herein incorporated by reference); mRNA (Malone et al., Proc. Natl. Acad. Sci. USA (1989) 86:6077-6081, which is herein incorporated by reference); and purified transcription factors (Debs et al., J. Biol. Chem. (1990) 265:10189-10192, which is herein incorporated by reference), in functional form.

[0441] Cationic liposomes are readily available. For example, N[1-2,3-dioleyloxy)propyl]-N,N,N-triethylammonium (DOTMA) liposomes are particularly useful and are available under the trademark Lipofectin, from GIBCO BRL, Grand Island, N.Y. (See, also, Felgner et al., Proc. Natl. Acad. Sci. USA (1987) 84:7413-7416, which is herein incorporated by reference). Other commercially available liposomes include transfectace (DDAB/DOPE) and DOTAP/DOPE (Boehringer).

[0442] Other cationic liposomes can be prepared from readily available materials using techniques well known in the art. See, e.g. PCT Publication No. WO 90/11092 (which is herein incorporated by reference) for a description of the synthesis of DOTAP (1,2-bis(oleoyloxy)-3-(trimethylammonio)propane) liposomes. Preparation of DOTMA liposomes is explained in the literature, see, e.g., P. Felgner et al., Proc. Natl. Acad. Sci. USA 84:7413-7417, which is herein incorporated by reference. Similar methods can be used to prepare liposomes from other cationic lipid materials.

[0443] Similarly, anionic and neutral liposomes are readily available, such as from Avanti Polar Lipids (Birmingham, Ala.), or can be easily prepared using readily available materials. Such materials include phosphatidyl, choline, cholesterol, phosphatidyl ethanolamine, dioleoylphosphatidyl choline (DOPC), dioleoylphosphatidyl glycerol (DOPG), dioleoylphoshatidyl ethanolamine (DOPE), among others. These materials can also be mixed with the DOTMA and DOTAP starting materials in appropriate ratios. Methods for making liposomes using these materials are well known in the art.

[0444] For example, commercially dioleoylphosphatidyl choline (DOPC), dioleoylphosphatidyl glycerol (DOPG), and dioleoylphosphatidyl ethanolamine (DOPE) can be used in various combinations to make conventional liposomes, with or without the addition of cholesterol. Thus, for example, DOPG/DOPC vesicles can be prepared by drying 50 mg each of DOPG and DOPC under a stream of nitrogen gas into a sonication vial. The sample is placed under a vacuum pump overnight and is hydrated the following day with deionized water. The sample is then sonicated for 2 hours in a capped vial, using a Heat Systems model 350 sonicator equipped with an inverted cup (bath type) probe at the maximum setting while the bath is circulated at 15EC. Alternatively, negatively charged vesicles can be prepared without sonication to produce multilamellar vesicles or by extrusion through nucleopore membranes to produce unilamellar vesicles of discrete size. Other methods are known and available to those of skill in the art.

[0445] The liposomes can comprise multilamellar vesicles (MLVs), small unilamellar vesicles (SUVs), or large unilamellar vesicles (LUVs), with SUVs being preferred. The various liposome-nucleic acid complexes are prepared using methods well known in the art. See, e.g., Straubinger et al., Methods of Immunology (1983), 101:512-527, which is herein incorporated by reference. For example, MLVs containing nucleic acid can be prepared by depositing a thin film of phospholipid on the walls of a glass tube and subsequently hydrating with a solution of the material to be encapsulated. SUVs are prepared by extended sonication of MLVs to produce a homogeneous population of unilamellar liposomes. The material to be entrapped is added to a suspension of preformed MLVs and then sonicated. When using liposomes containing cationic lipids, the dried lipid film is resuspended in an appropriate solution such as sterile water or an isotonic buffer solution such as 10 mM Tris/NaCl, sonicated, and then the preformed liposomes are mixed directly with the DNA. The liposome and DNA form a very stable complex due to binding of the positively charged liposomes to the cationic DNA. SUVs find use with small nucleic acid fragments. LUVs are prepared by a number of methods, well known in the art. Commonly used methods include Ca²⁺-EDTA chelation (Papahadjopoulos et al., Biochim. Biophys. Acta (1975) 394:483; Wilson et al., Cell 17:77 (1979)); ether injection (Deamer, D. and Bangham, A., Biochim. Biophys. Acta 443:629 (1976); Ostro et al., Biochem. Biophys. Res. Commun. 76:836 (1977); Fraley et al., Proc. Natl. Acad. Sci. USA 76:3348 (1979)); detergent dialysis (Enoch, H. and Strittmatter, P., Proc. Natl. Acad. Sci. USA 76:145 (1979)); and reverse-phase evaporation (REV) (Fraley et al., J. Biol. Chem. 255:10431 (1980); Szoka, F. and Papahadjopoulos, D., Proc. Natl. Acad. Sci. USA 75:145 (1978); Schaefer-Ridder et al., Science 215:166 (1982)), which are herein incorporated by reference.

[0446] Generally, the ratio of DNA to liposomes will be from about 10:1 to about 1:10. Preferably, the ration will be from about 5:1 to about 1:5. More preferably, the ration will be about 3:1 to about 1:3. Still more preferably, the ratio will be about 1:1.

[0447] U.S. Pat. No. 5,676,954 (which is herein incorporated by reference) reports on the injection of genetic material, complexed with cationic liposomes carriers, into mice. U.S. Pat. Nos. 4,897,355, 4,946,787, 5,049,386, 5,459,127, 5,589,466, 5,693,622, 5,580,859, 5,703,055, and international publication no. WO 94/9469 (which are herein incorporated by reference) provide cationic lipids for use in transfecting DNA into cells and mammals. U.S. Pat. Nos. 5,589,466, 5,693,622, 5,580,859, 5,703,055, and international publication no. WO 94/9469 provide methods for delivering DNA-cationic lipid complexes to mammals.

[0448] In certain embodiments, cells are engineered, ex vivo or in vivo, using a retroviral particle containing RNA which comprises a sequence encoding a polypeptide of the present invention. Retroviruses from which the retroviral plasmid vectors may be derived include, but are not limited to, Moloney Murine Leukemia Virus, spleen necrosis virus, Rous sarcoma Virus, Harvey Sarcoma Virus, avian leukosis virus, gibbon ape leukemia virus, human immunodeficiency virus, Myeloproliferative Sarcoma Virus, and mammary tumor virus.

[0449] The retroviral plasmid vector is employed to transduce packaging cell lines to form producer cell lines. Examples of packaging cells which may be transfected include, but are not limited to, the PE501, PA317, R-2, R-AM, PA12, T19-14×, VT-19-17-H2, RCRE, RCRIP, GP+E-86, GP+envAm12, and DAN cell lines as described in Miller, Human Gene Therapy 1:5-14 (1990), which is incorporated herein by reference in its entirety. The vector may transduce the packaging cells through any means known in the art. Such means include, but are not limited to, electroporation, the use of liposomes, and CaPO₄ precipitation. In one alternative, the retroviral plasmid vector may be encapsulated into a liposome, or coupled to a lipid, and then administered to a host.

[0450] The producer cell line generates infectious retroviral vector particles which include polynucleotide encoding a polypeptide of the present invention. Such retroviral vector particles then may be employed, to transduce eukaryotic cells, either in vitro or in vivo. The transduced eukaryotic cells will express a polypeptide of the present invention.

[0451] In certain other embodiments, cells are engineered, ex vivo or in vivo, with polynucleotide contained in an adenovirus vector. Adenovirus can be manipulated such that it encodes and expresses a polypeptide of the present invention, and at the same time is inactivated in terms of its ability to replicate in a normal lytic viral life cycle. Adenovirus expression is achieved without integration of the viral DNA into the host cell chromosome, thereby alleviating concerns about insertional mutagenesis. Furthermore, adenoviruses have been used as live enteric vaccines for many years with an excellent safety profile (Schwartz et al. Am. Rev. Respir. Dis.109:233-238 (1974)). Finally, adenovirus mediated gene transfer has been demonstrated in a number of instances including transfer of alpha-1-antitrypsin and CFTR to the lungs of cotton rats (Rosenfeld, M. A. et al. (1991) Science 252:431-434; Rosenfeld et al., (1992) Cell 68:143-155). Furthermore, extensive studies to attempt to establish adenovirus as a causative agent in human cancer were uniformly negative (Green, M. et al. (1979) Proc. Natl. Acad. Sci. USA 76:6606).

[0452] Suitable adenoviral vectors useful in the present invention are described, for example, in Kozarsky and Wilson, Curr. Opin. Genet. Devel. 3:499-503 (1993); Rosenfeld et al., Cell 68:143-155 (1992); Engelhardt et al., Human Genet. Ther. 4:759-769 (1993); Yang et al., Nature Genet. 7:362-369 (1994); Wilson et al., Nature 365:691-692 (1993); and U.S. Pat. No. 5,652,224, which are herein incorporated by reference. For example, the adenovirus vector Ad2 is useful and can be grown in human 293 cells. These cells contain the E1 region of adenovirus and constitutively express E1a and E1b, which complement the defective adenoviruses by providing the products of the genes deleted from the vector. In addition to Ad2, other varieties of adenovirus (e.g., Ad3, Ad5, and Ad7) are also useful in the present invention.

[0453] Preferably, the adenoviruses used in the present invention are replication deficient. Replication deficient adenoviruses require the aid of a helper virus and/or packaging cell line to form infectious particles. The resulting virus is capable of infecting cells and can express a polynucleotide of interest which is operably linked to a promoter, but cannot replicate in most cells. Replication deficient adenoviruses may be deleted in one or more of all or a portion of the following genes: E1a, E1b, E3, E4, E2a, or L1 through L5.

[0454] In certain other embodiments, the cells are engineered, ex vivo or in vivo, using an adeno-associated virus (AAV). AAVs are naturally occurring defective viruses that require helper viruses to produce infectious particles (Muzyczka, N., Curr. Topics in Microbiol. Immunol. 158:97 (1992)). It is also one of the few viruses that may integrate its DNA into non-dividing cells. Vectors containing as little as 300 base pairs of AAV can be packaged and can integrate, but space for exogenous DNA is limited to about 4.5 kb. Methods for producing and using such AAVs are known in the art. See, for example, U.S. Pat. Nos. 5,139,941, 5,173,414, 5,354,678, 5,436,146, 5,474,935, 5,478,745, and 5,589,377.

[0455] For example, an appropriate AAV vector for use in the present invention will include all the sequences necessary for DNA replication, encapsidation, and host-cell integration. The polynucleotide construct is inserted into the AAV vector using standard cloning methods, such as those found in Sambrook et al., Molecular Cloning: A Laboratory Manual, Cold Spring Harbor Press (1989). The recombinant AAV vector is then transfected into packaging cells which are infected with a helper virus, using any standard technique, including lipofection, electroporation, calcium phosphate precipitation, etc. Appropriate helper viruses include adenoviruses, cytomegaloviruses, vaccinia viruses, or herpes viruses. Once the packaging cells are transfected and infected, they will produce infectious AAV viral particles which contain the polynucleotide construct. These viral particles are then used to transduce eukaryotic cells, either ex vivo or in vivo. The transduced cells will contain the polynucleotide construct integrated into its genome, and will express a polypeptide of the invention.

[0456] Another method of gene therapy involves operably associating heterologous control regions and endogenous polynucleotide sequences (e.g. encoding a polypeptide of the present invention) via homologous recombination (see, e.g., U.S. Pat. No. 5,641,670, issued Jun. 24, 1997; International Publication No. WO 96/29411, published Sep. 26, 1996; International Publication No. WO 94/12650, published Aug. 4, 1994; Koller et al., Proc. Natl. Acad. Sci. USA 86:8932-8935 (1989); and Zijlstra et al., Nature 342:435-438 (1989), which are herein encorporated by reference. This method involves the activation of a gene which is present in the target cells, but which is not normally expressed in the cells, or is expressed at a lower level than desired.

[0457] Polynucleotide constructs are made, using standard techniques known in the art, which contain the promoter with targeting sequences flanking the promoter. Suitable promoters are described herein. The targeting sequence is sufficiently complementary to an endogenous sequence to permit homologous recombination of the promoter-targeting sequence with the endogenous sequence. The targeting sequence will be sufficiently near the 5′ end of the desired endogenous polynucleotide sequence so the promoter will be operably linked to the endogenous sequence upon homologous recombination.

[0458] The promoter and the targeting sequences can be amplified using PCR. Preferably, the amplified promoter contains distinct restriction enzyme sites on the 5′ and 3′ ends. Preferably, the 3′ end of the first targeting sequence contains the same restriction enzyme site as the 5′ end of the amplified promoter and the 5′ end of the second targeting sequence contains the same restriction site as the 3′ end of the amplified promoter. The amplified promoter and targeting sequences are digested and ligated together.

[0459] The promoter-targeting sequence construct is delivered to the cells, either as naked polynucleotide, or in conjunction with transfection-facilitating agents, such as liposomes, viral sequences, viral particles, whole viruses, lipofection, precipitating agents, etc., described in more detail above. The P promoter-targeting sequence can be delivered by any method, included direct needle injection, intravenous injection, topical administration, catheter infusion, particle accelerators, etc. The methods are described in more detail below.

[0460] The promoter-targeting sequence construct is taken up by cells. Homologous recombination between the construct and the endogenous sequence takes place, such that an endogenous sequence is placed under the control of the promoter. The promoter then drives the expression of the endogenous sequence.

[0461] The polynucleotide encoding a polypeptide of the present invention may contain a secretory signal sequence that facilitates secretion of the protein. Typically, the signal sequence is positioned in the coding region of the polynucleotide to be expressed towards or at the 5′ end of the coding region. The signal sequence may be homologous or heterologous to the polynucleotide of interest and may be homologous or heterologous to the cells to be transfected. Additionally, the signal sequence may be chemically synthesized using methods known in the art.

[0462] Any mode of administration of any of the above-described polynucleotides constructs can be used so long as the mode results in the expression of one or more molecules in an amount sufficient to provide a therapeutic effect. This includes direct needle injection, systemic injection, catheter infusion, biolistic injectors, particle accelerators (i.e., “gene guns”), gelfoam sponge depots, other commercially available depot materials, osmotic pumps (e.g., Alza minipumps), oral or suppositorial solid (tablet or pill) pharmaceutical formulations, and decanting or topical applications during surgery. For example, direct injection of naked calcium phosphate-precipitated plasmid into rat liver and rat spleen or a protein-coated plasmid into the portal vein has resulted in gene expression of the foreign gene in the rat livers (Kaneda et al., Science 243:375 (1989)).

[0463] A preferred method of local administration is by direct injection. Preferably, a recombinant molecule of the present invention complexed with a delivery vehicle is administered by direct injection into or locally within the area of arteries. Administration of a composition locally within the area of arteries refers to injecting the composition centimeters and preferably, millimeters within arteries.

[0464] Another method of local administration is to contact a polynucleotide construct of the present invention in or around a surgical wound. For example, a patient can undergo surgery and the polynucleotide construct can be coated on the surface of tissue inside the wound or the construct can be injected into areas of tissue inside the wound.

[0465] Therapeutic compositions useful in systemic administration, include recombinant molecules of the present invention complexed to a targeted delivery vehicle of the present invention. Suitable delivery vehicles for use with systemic administration comprise liposomes comprising ligands for targeting the vehicle to a particular site. In specific embodiments, suitable delivery vehicles for use with systemic administration comprise liposomes comprising polypeptides of the invention for targeting the vehicle to a particular site.

[0466] Preferred methods of systemic administration, include intravenous injection, aerosol, oral and percutaneous (topical) delivery. Intravenous injections can be performed using methods standard in the art. Aerosol delivery can also be performed using methods standard in the art (see, for example, Stribling et al., Proc. Natl. Acad. Sci. USA 189:11277-11281, 1992, which is incorporated herein by reference). Oral delivery can be performed by complexing a polynucleotide construct of the present invention to a carrier capable of withstanding degradation by digestive enzymes in the gut of an animal. Examples of such carriers, include plastic capsules or tablets, such as those known in the art. Topical delivery can be performed by mixing a polynucleotide construct of the present invention with a lipophilic reagent (e.g., DMSO) that is capable of passing into the skin.

[0467] Determining an effective amount of substance to be delivered can depend upon a number of factors including, for example, the chemical structure and biological activity of the substance, the age and weight of the animal, the precise condition requiring treatment and its severity, and the route of administration. The frequency of treatments depends upon a number of factors, such as the amount of polynucleotide constructs administered per dose, as well as the health and history of the subject. The precise amount, number of doses, and timing of doses will be determined by the attending physician or veterinarian.

[0468] Therapeutic compositions of the present invention can be administered to any animal, preferably to mammals and birds. Preferred mammals include humans, dogs, cats, mice, rats, rabbits sheep, cattle, horses and pigs, with humans being particularly preferred.

[0469] Biological Activities

[0470] Polynucleotides or polypeptides, or agonists or antagonists of the present invention, can be used in assays to test for one or more biological activities. If these polynucleotides or polypeptides, or agonists or antagonists of the present invention, do exhibit activity in a particular assay, it is likely that these molecules may be involved in the diseases associated with the biological activity. Thus, the polynucleotides and polypeptides, and agonists or antagonists could be used to treat the associated disease.

[0471] Immunomodulatory proteins are believed to be involved in biological activities associated with regulation of immune responses and of immune system cells and polypeptides as well as the regulation of hematopoiesis. Accordingly, compositions of the invention (including polynucleotides, polypeptides and antibodies of the invention, and fragments and variants thereof) may be used in the diagnosis, prognosis, prevention, and/or treatment of diseases and/or disorders associated with aberrant immune system activity.

[0472] In preferred embodiments, compositions of the invention (including polynucleotides, polypeptides and antibodies of the invention, and fragments and variants thereof) may be used in the diagnosis, prognosis, prevention, and/or treatment of immune system-associated diseases and/or disorders including, but not limited to autoimmune disorders (e.g., systemic lupus erythematosus, rheumatoid arthritis, multiple sclerosis, and/or as described in the section entitled “Immune Activity”), immunodeficiencies (e.g., agammaglobulinemias, severe combined immunodeficiency (SCID), AIDS, and/or as described in the section entitled “Immune Activity”), inflammatory disorders (e.g., allergies, asthma, encephalitis, and/or as described in the section entitled “Immune Activity”), complement activation disorders, immune complex diseases, infectious diseases (e.g., viral hepatitis, pneumonia, Legionella disease, and/or as described under the “Immune Activity” and “Infectious Disease” sections herein) and neoplastic disorders (e.g., especially cancers of immune sytem cells and/or as described in the sections entitled “Immune Activity” and “Hyperproliferative Disorders”).

[0473] In another preferred embodiment, compositions of the invention (including polynucleotides, polypeptides and antibodies of the invention, and fragments and variants thereof) are used to prevent organ/tissue transplant rejection.

[0474] In another preferred embodiment, compositions of the invention (including polynucleotides, polypeptides and antibodies of the invention, and fragments and variants thereof) are used as immunosuppressive agents, for example to facilitate organ transplantation or treat autoimmune diseases.

[0475] In another preferred embodiment, compositions of the invention (including polynucleotides, polypeptides and antibodies of the invention, and fragments and variants thereof) are used as immunostimulant agents, for example in the treatment of immunodeficiencies or chronic infections.

[0476] In another embodiment, a polypeptide of the invention, or polynucleotides, antibodies, agonists, or antagonists corresponding to that polypeptide, may be used to diagnose, prognose, prevent, and/or treat diseases and/or disorders associated with the tissue(s) in which the polypeptide of the invention is expressed, including one, two, three, four, five, or more tissues disclosed in Table 1a, column 8 (Tissue Distribution Library Code).

[0477] Thus, polynucleotides, translation products and antibodies of the invention are useful in the diagnosis, prognosis, prevention, and/or treatment of diseases and/or disorders associated with activities that include, but are not limited to immunosuppression or immunostimulation, as well as autoimmune disorders, immunodeficiencies, inflammatory diseases and/or conditions, complement activation disorders, immune complex diseases, infectious diseases, neoplastic disorders, and organ/tissue transplant rejection.

[0478] More generally, polynucleotides, translation products and antibodies corresponding to this gene may be useful for the diagnosis, prognosis, prevention and/or treatment of diseases and/or disorders associated with the following systems.

[0479] Immune Activity

[0480] Polynucleotides, polypeptides, antibodies, and/or agonists or antagonists of the present invention may be useful in treating, preventing, diagnosing and/or prognosing diseases, disorders, and/or conditions of the immune system, by, for example, activating or inhibiting the proliferation, differentiation, or mobilization (chemotaxis) of immune cells. Immune cells develop through a process called hematopoiesis, producing myeloid (platelets, red blood cells, neutrophils, and macrophages) and lymphoid (B and T lymphocytes) cells from pluripotent stem cells. The etiology of these immune diseases, disorders, and/or conditions may be genetic, somatic, such as cancer and some autoimmune diseases, acquired (e.g., by chemotherapy or toxins), or infectious. Moreover, polynucleotides, polypeptides, antibodies, and/or agonists or antagonists of the present invention can be used as a marker or detector of a particular immune system disease or disorder.

[0481] In another embodiment, a polypeptide of the invention, or polynucleotides, antibodies, agonists, or antagonists corresponding to that polypeptide, may be used to treat diseases and disorders of the immune system and/or to inhibit or enhance an immune response generated by cells associated with the tissue(s) in which the polypeptide of the invention is expressed, including one, two, three, four, five, or more tissues disclosed in Table 1A, column 8 (Tissue Distribution Library Code).

[0482] Polynucleotides, polypeptides, antibodies, and/or agonists or antagonists of the present invention may be useful in treating, preventing, diagnosing, and/or prognosing immunodeficiencies, including both congenital and acquired immunodeficiencies. Examples of B cell immunodeficiencies in which immunoglobulin levels B cell function and/or B cell numbers are decreased include: X-linked agammaglobulinemia (Bruton's disease), X-linked infantile agammaglobulinemia, X-linked immunodeficiency with hyper IgM, non X-linked immunodeficiency with hyper IgM, X-linked lymphoproliferative syndrome (XLP), agammaglobulinemia including congenital and acquired agammaglobulinemia, adult onset agammaglobulinemia, late-onset agammaglobulinemia, dysgammaglobulinemia, hypogammaglobulinemia, unspecified hypogammaglobulinemia, recessive agammaglobulinemia (Swiss type), Selective IgM deficiency, selective IgA deficiency, selective IgG subclass deficiencies, IgG subclass deficiency (with or without IgA deficiency), Ig deficiency with increased IgM, IgG and IgA deficiency with increased IgM, antibody deficiency with normal or elevated Igs, Ig heavy chain deletions, kappa chain deficiency, B cell lymphoproliferative disorder (BLPD), common variable immunodeficiency (CVID), common variable immunodeficiency (CVI) (acquired), and transient hypogammaglobulinemia of infancy.

[0483] In specific embodiments, ataxia-telangiectasia or conditions associated with ataxia-telangiectasia are treated, prevented, diagnosed, and/or prognosing using the polypeptides or polynucleotides of the invention, and/or agonists or antagonists thereof.

[0484] Examples of congenital immunodeficiencies in which T-cell and/or B cell function and/or number is decreased include, but are not limited to: DiGeorge anomaly, severe combined immunodeficiencies (SCID) (including, but not limited to, X-linked SCID, autosomal recessive SCID, adenosine deaminase deficiency, purine nucleoside phosphorylase (PNP) deficiency, Class II MHC deficiency (Bare lymphocyte syndrome), Wiskott-Aldrich syndrome, and ataxia telangiectasia), thymic hypoplasia, third and fourth pharyngeal pouch syndrome, 22q11.2 deletion, chronic mucocutaneous candidiasis, natural killer cell deficiency (NK), idiopathic CD4+ T-lymphocytopenia, immunodeficiency with predominant T cell defect (unspecified), and unspecified immunodeficiency of cell mediated immunity.

[0485] In specific embodiments, DiGeorge anomaly or conditions associated with DiGeorge anomaly are treated prevented, diagnosed, and/or prognosed using polypeptides or polynucleotides of the invention, or antagonists or agonists thereof.

[0486] Other immunodeficiencies that may be treated, prevented, diagnosed, and/or prognosed using polypeptides or polynucleotides of the invention, and/or agonists or antagonists thereof, include, but are not limited to, chronic granulomatous disease, Chédiak-Higashi syndrome, myeloperoxidase deficiency, leukocyte glucose-6-phosphate dehydrogenase deficiency, X-linked lymphoproliferative syndrome (XLP), leukocyte adhesion deficiency, complement component deficiencies (including C1, C2, C3, C4, C5, C6, C7, C8 and/or C9 deficiencies), reticular dysgenesis, thymic alymphoplasia-aplasia, immunodeficiency with thymoma, severe congenital leukopenia, dysplasia with immunodeficiency, neonatal neutropenia, short limbed dwarfism, and Nezelof syndrome-combined immunodeficiency with Igs.

[0487] In a preferred embodiment, the immunodeficiencies and/or conditions associated with the immunodeficiencies recited above are treated, prevented, diagnosed and/or prognosed using polynucleotides, polypeptides, antibodies, and/or agonists or antagonists of the present invention.

[0488] In a preferred embodiment polynucleotides, polypeptides, antibodies, and/or agonists or antagonists of the present invention could be used as an agent to boost immunoresponsiveness among immunodeficient individuals. In specific embodiments, polynucleotides, polypeptides, antibodies, and/or agonists or antagonists of the present invention could be used as an agent to boost immunoresponsiveness among B cell and/or T cell immunodeficient individuals.

[0489] The polynucleotides, polypeptides, antibodies, and/or agonists or antagonists of the present invention may be useful in treating, preventing, diagnosing and/or prognosing autoimmune disorders. Many autoimmune disorders result from inappropriate recognition of self as foreign material by immune cells. This inappropriate recognition results in an immune response leading to the destruction of the host tissue. Therefore, the administration of polynucleotides and polypeptides of the invention that can inhibit an immune response, particularly the proliferation, differentiation, or chemotaxis of T-cells, may be an effective therapy in preventing autoimmune disorders.

[0490] Autoimmune diseases or disorders that may be treated, prevented, diagnosed and/or prognosed by polynucleotides, polypeptides, antibodies, and/or agonists or antagonists of the present invention include, but are not limited to, one or more of the following: systemic lupus erythematosus, rheumatoid arthritis, ankylosing spondylitis, multiple sclerosis, autoimmune thyroiditis, Hashimoto's thyroiditis, autoimmune hemolytic anemia, hemolytic anemia, thrombocytopenia, autoimmune thrombocytopenia purpura, autoimmune neonatal thrombocytopenia, idiopathic thrombocytopenia purpura, purpura (e.g., Henloch-Scoenlein purpura), autoimmunocytopenia, Goodpasture's syndrome, Pemphigus vulgaris, myasthenia gravis, Grave's disease (hyperthyroidism), and insulin-resistant diabetes mellitus.

[0491] Additional disorders that are likely to have an autoimmune component that may be treated, prevented, and/or diagnosed with the compositions of the invention include, but are not limited to, type II collagen-induced arthritis, antiphospholipid syndrome, dermatitis, allergic encephalomyelitis, myocarditis, relapsing polychondritis, rheumatic heart disease, neuritis, uveitis ophthalmia, polyendocrinopathies, Reiter's Disease, Stiff-Man Syndrome, autoimmune pulmonary inflammation, autism, Guillain-Barre Syndrome, insulin dependent diabetes mellitus, and autoimmune inflammatory eye disorders.

[0492] Additional disorders that are likely to have an autoimmune component that may be treated, prevented, diagnosed and/or prognosed with the compositions of the invention include, but are not limited to, scleroderma with anti-collagen antibodies (often characterized, e.g., by nucleolar and other nuclear antibodies), mixed connective tissue disease (often characterized, e.g., by antibodies to extractable nuclear antigens (e.g., ribonucleoprotein)), polymyositis (often characterized, e.g., by nonhistone ANA), pernicious anemia (often characterized, e.g., by antiparietal cell, microsomes, and intrinsic factor antibodies), idiopathic Addison's disease (often characterized, e.g., by humoral and cell-mediated adrenal cytotoxicity, infertility (often characterized, e.g., by antispermatozoal antibodies), glomerulonephritis (often characterized, e.g., by glomerular basement membrane antibodies or immune complexes), bullous pemphigoid (often characterized, e.g., by IgG and complement in basement membrane), Sjogren's syndrome (often characterized, e.g., by multiple tissue antibodies, and/or a specific nonhistone ANA (SS-B)), diabetes mellitus (often characterized, e.g., by cell-mediated and humoral islet cell antibodies), and adrenergic drug resistance (including adrenergic drug resistance with asthma or cystic fibrosis) (often characterized, e.g., by beta-adrenergic receptor antibodies).

[0493] Additional disorders that may have an autoimmune component that may be treated, prevented, diagnosed and/or prognosed with the compositions of the invention include, but are not limited to, chronic active hepatitis (often characterized, e.g., by smooth muscle antibodies), primary biliary cirrhosis (often characterized, e.g., by mitochondria antibodies), other endocrine gland failure (often characterized, e.g., by specific tissue antibodies in some cases), vitiligo (often characterized, e.g., by melanocyte antibodies), vasculitis (often characterized, e.g., by Ig and complement in vessel walls and/or low serum complement), post-MI (often characterized, e.g., by myocardial antibodies), cardiotomy syndrome (often characterized, e.g., by myocardial antibodies), urticaria (often characterized, e.g., by IgG and IgM antibodies to IgE), atopic dermatitis (often characterized, e.g., by IgG and IgM antibodies to IgE), asthma (often characterized, e.g., by IgG and IgM antibodies to IgE), and many other inflammatory, granulomatous, degenerative, and atrophic disorders.

[0494] In a preferred embodiment, the autoimmune diseases and disorders and/or conditions associated with the diseases and disorders recited above are treated, prevented, diagnosed and/or prognosed using for example, antagonists or agonists, polypeptides or polynucleotides, or antibodies of the present invention. In a specific preferred embodiment, rheumatoid arthritis is treated, prevented, and/or diagnosed using polynucleotides, polypeptides, antibodies, and/or agonists or antagonists of the present invention.

[0495] In another specific preferred embodiment, systemic lupus erythematosus is treated, prevented, and/or diagnosed using polynucleotides, polypeptides, antibodies, and/or agonists or antagonists of the present invention. In another specific preferred embodiment, idiopathic thrombocytopenia purpura is treated, prevented, and/or diagnosed using polynucleotides, polypeptides, antibodies, and/or agonists or antagonists of the present invention.

[0496] In another specific preferred embodiment IgA nephropathy is treated, prevented, and/or diagnosed using polynucleotides, polypeptides, antibodies, and/or agonists or antagonists of the present invention.

[0497] In a preferred embodiment, the autoimmune diseases and disorders and/or conditions associated with the diseases and disorders recited above are treated, prevented, diagnosed and/or prognosed using polynucleotides, polypeptides, antibodies, and/or agonists or antagonists of the present invention

[0498] In preferred embodiments, polypeptides, antibodies, polynucleotides and/or agonists or antagonists of the present invention are used as a immunosuppressive agent(s).

[0499] Polynucleotides, polypeptides, antibodies, and/or agonists or antagonists of the present invention may be useful in treating, preventing, prognosing, and/or diagnosing diseases, disorders, and/or conditions of hematopoietic cells. Polynucleotides, polypeptides, antibodies, and/or agonists or antagonists of the present invention could be used to increase differentiation and proliferation of hematopoietic cells, including the pluripotent stem cells, in an effort to treat or prevent those diseases, disorders, and/or conditions associated with a decrease in certain (or many) types hematopoietic cells, including but not limited to, leukopenia, neutropenia, anemia, and thrombocytopenia. Alternatively, Polynucleotides, polypeptides, antibodies, and/or agonists or antagonists of the present invention could be used to increase differentiation and proliferation of hematopoietic cells, including the pluripotent stem cells, in an effort to treat or prevent those diseases, disorders, and/or conditions associated with an increase in certain (or many) types of hematopoietic cells, including but not limited to, histiocytosis.

[0500] Allergic reactions and conditions, such as asthma (particularly allergic asthma) or other respiratory problems, may also be treated, prevented, diagnosed and/or prognosed using polypeptides, antibodies, or polynucleotides of the invention, and/or agonists or antagonists thereof. Moreover, these molecules can be used to treat, prevent, prognose, and/or diagnose anaphylaxis, hypersensitivity to an antigenic molecule, or blood group incompatibility.

[0501] Additionally, polypeptides or polynucleotides of the invention, and/or agonists or antagonists thereof, may be used to treat, prevent, diagnose and/or prognose IgE-mediated allergic reactions. Such allergic reactions include, but are not limited to, asthma, rhinitis, and eczema. In specific embodiments, polynucleotides, polypeptides, antibodies, and/or agonists or antagonists of the present invention may be used to modulate IgE concentrations in vitro or in vivo.

[0502] Moreover, polynucleotides, polypeptides, antibodies, and/or agonists or antagonists of the present invention have uses in the diagnosis, prognosis, prevention, and/or treatment of inflammatory conditions. For example, since polypeptides, antibodies, or polynucleotides of the invention, and/or agonists or antagonists of the invention may inhibit the activation, proliferation and/or differentiation of cells involved in an inflammatory response, these molecules can be used to prevent and/or treat chronic and acute inflammatory conditions. Such inflammatory conditions include, but are not limited to, for example, inflammation associated with infection (e.g., septic shock, sepsis, or systemic inflammatory response syndrome), ischemia-reperfusion injury, endotoxin lethality, complement-mediated hyperacute rejection, nephritis, cytokine or chemokine induced lung injury, inflammatory bowel disease, Crohn's disease, over production of cytokines (e.g., TNF or IL-1.), respiratory disorders (e.g., asthma and allergy); gastrointestinal disorders (e.g., inflammatory bowel disease); cancers (e.g., gastric, ovarian, lung, bladder, liver, and breast); CNS disorders (e.g., multiple sclerosis; ischemic brain injury and/or stroke, traumatic brain injury, neurodegenerative disorders (e.g., Parkinson's disease and Alzheimer's disease); AIDS-related dementia; and prion disease); cardiovascular disorders (e.g., atherosclerosis, myocarditis, cardiovascular disease, and cardiopulmonary bypass complications); as well as many additional diseases, conditions, and disorders that are characterized by inflammation (e.g., hepatitis, rheumatoid arthritis, gout, trauma, pancreatitis, sarcoidosis, dermatitis, renal ischemia-reperfusion injury, Grave's disease, systemic lupus erythematosus, diabetes mellitus, and allogenic transplant rejection).

[0503] Because inflammation is a fundamental defense mechanism, inflammatory disorders can effect virtually any tissue of the body. Accordingly, polynucleotides, polypeptides, and antibodies of the invention, as well as agonists or antagonists thereof, have uses in the treatment of tissue-specific inflammatory disorders, including, but not limited to, adrenalitis, alveolitis, angiocholecystitis, appendicitis, balanitis, blepharitis, bronchitis, bursitis, carditis, cellulitis, cervicitis, cholecystitis, chorditis, cochlitis, colitis, conjunctivitis, cystitis, dermatitis, diverticulitis, encephalitis, endocarditis, esophagitis, eustachitis, fibrositis, folliculitis, gastritis, gastroenteritis, gingivitis, glossitis, hepatosplenitis, keratitis, labyrinthitis, laryngitis, lymphangitis, mastitis, media otitis, meningitis, metritis, mucitis, myocarditis, myosititis, myringitis, nephritis, neuritis, orchitis, osteochondritis, otitis, pericarditis, peritendonitis, peritonitis, pharyngitis, phlebitis, poliomyelitis, prostatitis, pulpitis, retinitis, rhinitis, salpingitis, scleritis, sclerochoroiditis, scrotitis, sinusitis, spondylitis, steatitis, stomatitis, synovitis, syringitis, tendonitis, tonsillitis, urethritis, and vaginitis.

[0504] In specific embodiments, polypeptides, antibodies, or polynucleotides of the invention, and/or agonists or antagonists thereof, are useful to diagnose, prognose, prevent, and/or treat organ transplant rejections and graft-versus-host disease. Organ rejection occurs by host immune cell destruction of the transplanted tissue through an immune response. Similarly, an immune response is also involved in GVHD, but, in this case, the foreign transplanted immune cells destroy the host tissues. Polypeptides, antibodies, or polynucleotides of the invention, and/or agonists or antagonists thereof, that inhibit an immune response, particularly the activation, proliferation, differentiation, or chemotaxis of T-cells, may be an effective therapy in preventing organ rejection or GVHD. In specific embodiments, polypeptides, antibodies, or polynucleotides of the invention, and/or agonists or antagonists thereof, that inhibit an immune response, particularly the activation, proliferation, differentiation, or chemotaxis of T-cells, may be an effective therapy in preventing experimental allergic and hyperacute xenograft rejection.

[0505] In other embodiments, polypeptides, antibodies, or polynucleotides of the invention, and/or agonists or antagonists thereof, are useful to diagnose, prognose, prevent, and/or treat immune complex diseases, including, but not limited to, serum sickness, post streptococcal glomerulonephritis, polyarteritis nodosa, and immune complex-induced vasculitis.

[0506] Polypeptides, antibodies, polynucleotides and/or agonists or antagonists of the invention can be used to treat, detect, and/or prevent infectious agents. For example, by increasing the immune response, particularly increasing the proliferation activation and/or differentiation of B and/or T cells, infectious diseases may be treated, detected, and/or prevented. The immune response may be increased by either enhancing an existing immune response, or by initiating a new immune response. Alternatively, polynucleotides, polypeptides, antibodies, and/or agonists or antagonists of the present invention may also directly inhibit the infectious agent (refer to section of application listing infectious agents, etc), without necessarily eliciting an immune response.

[0507] In another embodiment, polypeptides, antibodies, polynucleotides and/or agonists or antagonists of the present invention are used as a vaccine adjuvant that enhances immune responsiveness to an antigen. In a specific embodiment, polypeptides, antibodies, polynucleotides and/or agonists or antagonists of the present invention are used as an adjuvant to enhance tumor-specific immune responses.

[0508] In another specific embodiment, polypeptides, antibodies, polynucleotides and/or agonists or antagonists of the present invention are used as an adjuvant to enhance anti-viral immune responses. Anti-viral immune responses that may be enhanced using the compositions of the invention as an adjuvant, include virus and virus associated diseases or symptoms described herein or otherwise known in the art. In specific embodiments, the compositions of the invention are used as an adjuvant to enhance an immune response to a virus, disease, or symptom selected from the group consisting of: AIDS, meningitis, Dengue, EBV, and hepatitis (e.g., hepatitis B). In another specific embodiment, the compositions of the invention are used as an adjuvant to enhance an immune response to a virus, disease, or symptom selected from the group consisting of: HIV/AIDS, respiratory syncytial virus, Dengue, rotavirus, Japanese B encephalitis, influenza A and B, parainfluenza, measles, cytomegalovirus, rabies, Junin, Chikungunya, Rift Valley Fever, herpes simplex, and yellow fever.

[0509] In another specific embodiment, polypeptides, antibodies, polynucleotides and/or agonists or antagonists of the present invention are used as an adjuvant to enhance anti-bacterial or anti-fungal immune responses. Anti-bacterial or anti-fungal immune responses that may be enhanced using the compositions of the invention as an adjuvant, include bacteria or fungus and bacteria or fungus associated diseases or symptoms described herein or otherwise known in the art. In specific embodiments, the compositions of the invention are used as an adjuvant to enhance an immune response to a bacteria or fungus, disease, or symptom selected from the group consisting of: tetanus, Diphtheria, botulism, and meningitis type B.

[0510] In another specific embodiment, the compositions of the invention are used as an adjuvant to enhance an immune response to a bacteria or fungus, disease, or symptom selected from the group consisting of: Vibrio cholerae, Mycobacterium leprae, Salmonella typhi, Salmonella paratyphi, Meisseria meningitidis, Streptococcus pneumoniae, Group B streptococcus, Shigella spp., Enterotoxigenic Escherichia coli, Enterohemorrhagic E. coli, and Borrelia burgdorferi.

[0511] In another specific embodiment, polypeptides, antibodies, polynucleotides and/or agonists or antagonists of the present invention are used as an adjuvant to enhance anti-parasitic immune responses. Anti-parasitic immune responses that may be enhanced using the compositions of the invention as an adjuvant, include parasite and parasite associated diseases or symptoms described herein or otherwise known in the art. In specific embodiments, the compositions of the invention are used as an adjuvant to enhance an immune response to a parasite. In another specific embodiment, the compositions of the invention are used as an adjuvant to enhance an immune response to Plasmodium (malaria) or Leishmania.

[0512] In another specific embodiment, polypeptides, antibodies, polynucleotides and/or agonists or antagonists of the present invention may also be employed to treat infectious diseases including silicosis, sarcoidosis, and idiopathic pulmonary fibrosis; for example, by preventing the recruitment and activation of mononuclear phagocytes.

[0513] In another specific embodiment, polypeptides, antibodies, polynucleotides and/or agonists or antagonists of the present invention are used as an antigen for the generation of antibodies to inhibit or enhance immune mediated responses against polypeptides of the invention.

[0514] In one embodiment, polypeptides, antibodies, polynucleotides and/or agonists or antagonists of the present invention are administered to an animal (e.g., mouse, rat, rabbit, hamster, guinea pig, pigs, micro-pig, chicken, camel, goat, horse, cow, sheep, dog, cat, non-human primate, and human, most preferably human) to boost the immune system to produce increased quantities of one or more antibodies (e.g., IgG, IgA, IgM, and IgE), to induce higher affinity antibody production and immunoglobulin class switching (e.g., IgG, IgA, IgM, and IgE), and/or to increase an immune response.

[0515] In another specific embodiment, polypeptides, antibodies, polynucleotides and/or agonists or antagonists of the present invention are used as a stimulator of B cell responsiveness to pathogens.

[0516] In another specific embodiment, polypeptides, antibodies, polynucleotides and/or agonists or antagonists of the present invention are used as an activator of T cells.

[0517] In another specific embodiment, polypeptides, antibodies, polynucleotides and/or agonists or antagonists of the present invention are used as an agent that elevates the immune status of an individual prior to their receipt of immunosuppressive therapies.

[0518] In another specific embodiment, polypeptides, antibodies, polynucleotides and/or agonists or antagonists of the present invention are used as an agent to induce higher affinity antibodies.

[0519] In another specific embodiment, polypeptides, antibodies, polynucleotides and/or agonists or antagonists of the present invention are used as an agent to increase serum immunoglobulin concentrations.

[0520] In another specific embodiment, polypeptides, antibodies, polynucleotides and/or agonists or antagonists of the present invention are used as an agent to accelerate recovery of immunocompromised individuals.

[0521] In another specific embodiment, polypeptides, antibodies, polynucleotides and/or agonists or antagonists of the present invention are used as an agent to boost immunoresponsiveness among aged populations and/or neonates.

[0522] In another specific embodiment, polypeptides, antibodies, polynucleotides and/or agonists or antagonists of the present invention are used as an immune system enhancer prior to, during, or after bone marrow transplant and/or other transplants (e.g., allogeneic or xenogeneic organ transplantation). With respect to transplantation, compositions of the invention may be administered prior to, concomitant with, and/or after transplantation. In a specific embodiment, compositions of the invention are administered after transplantation, prior to the beginning of recovery of T-cell populations. In another specific embodiment, compositions of the invention are first administered after transplantation after the beginning of recovery of T cell populations, but prior to full recovery of B cell populations.

[0523] In another specific embodiment, polypeptides, antibodies, polynucleotides and/or agonists or antagonists of the present invention are used as an agent to boost immunoresponsiveness among individuals having an acquired loss of B cell function. Conditions resulting in an acquired loss of B cell function that may be ameliorated or treated by administering the polypeptides, antibodies, polynucleotides and/or agonists or antagonists thereof, include, but are not limited to, HIV Infection, AIDS, bone marrow transplant, and B cell chronic lymphocytic leukemia (CLL).

[0524] In another specific embodiment, polypeptides, antibodies, polynucleotides and/or agonists or antagonists of the present invention are used as an agent to boost immunoresponsiveness among individuals having a temporary immune deficiency. Conditions resulting in a temporary immune deficiency that may be ameliorated or treated by administering the polypeptides, antibodies, polynucleotides and/or agonists or antagonists thereof, include, but are not limited to, recovery from viral infections (e.g., influenza), conditions associated with malnutrition, recovery from infectious mononucleosis, or conditions associated with stress, recovery from measles, recovery from blood transfusion, and recovery from surgery.

[0525] In another specific embodiment, polypeptides, antibodies, polynucleotides and/or agonists or antagonists of the present invention are used as a regulator of antigen presentation by monocytes, dendritic cells, and/or B-cells. In one embodiment, polynucleotides, polypeptides, antibodies, and/or agonists or antagonists of the present invention enhance antigen presentation or antagonizes antigen presentation in vitro or in vivo. Moreover, in related embodiments, said enhancement or antagonism of antigen presentation may be useful as an anti-tumor treatment or to modulate the immune system.

[0526] In another specific embodiment, polypeptides, antibodies, polynucleotides and/or agonists or antagonists of the present invention are used as an agent to direct an individual's immune system towards development of a humoral response (i.e. TH2) as opposed to a TH1 cellular response.

[0527] In another specific embodiment, polypeptides, antibodies, polynucleotides and/or agonists or antagonists of the present invention are used as a means to induce tumor proliferation and thus make it more susceptible to anti-neoplastic agents. For example, multiple myeloma is a slowly dividing disease and is thus refractory to virtually all anti-neoplastic regimens. If these cells were forced to proliferate more rapidly their susceptibility profile would likely change.

[0528] In another specific embodiment, polypeptides, antibodies, polynucleotides and/or agonists or antagonists of the present invention are used as a stimulator of B cell production in pathologies such as AIDS, chronic lymphocyte disorder and/or Common Variable Immunodificiency.

[0529] In another specific embodiment, polypeptides, antibodies, polynucleotides and/or agonists or antagonists of the present invention are used as a therapy for generation and/or regeneration of lymphoid tissues following surgery, trauma or genetic defect. In another specific embodiment, polypeptides, antibodies, polynucleotides and/or agonists or antagonists of the present invention are used in the pretreatment of bone marrow samples prior to transplant.

[0530] In another specific embodiment, polypeptides, antibodies, polynucleotides and/or agonists or antagonists of the present invention are used as a gene-based therapy for genetically inherited disorders resulting in immuno-incompetence/immunodeficiency such as observed among SCID patients.

[0531] In another specific embodiment, polypeptides, antibodies, polynucleotides and/or agonists or antagonists of the present invention are used as a means of activating monocytes/macrophages to defend against parasitic diseases that effect monocytes such as Leishmania.

[0532] In another specific embodiment, polypeptides, antibodies, polynucleotides and/or agonists or antagonists of the present invention are used as a means of regulating secreted cytokines that are elicited by polypeptides of the invention.

[0533] In another embodiment, polypeptides, antibodies, polynucleotides and/or agonists or antagonists of the present invention are used in one or more of the applications decribed herein, as they may apply to veterinary medicine.

[0534] In another specific embodiment, polypeptides, antibodies, polynucleotides and/or agonists or antagonists of the present invention are used as a means of blocking various aspects of immune responses to foreign agents or self. Examples of diseases or conditions in which blocking of certain aspects of immune responses may be desired include autoimmune disorders such as lupus, and arthritis, as well as immunoresponsiveness to skin allergies, inflammation, bowel disease, injury and diseases/disorders associated with pathogens.

[0535] In another specific embodiment, polypeptides, antibodies, polynucleotides and/or agonists br antagonists of the present invention are used as a therapy for preventing the B cell proliferation and Ig secretion associated with autoimmune diseases such as idiopathic thrombocytopenic purpura, systemic lupus erythematosus and multiple sclerosis.

[0536] In another specific embodiment, polypeptides, antibodies, polynucleotides and/or agonists or antagonists of the present invention are used as a inhibitor of B and/or T cell migration in endothelial cells. This activity disrupts tissue architecture or cognate responses and is useful, for example in disrupting immune responses, and blocking sepsis.

[0537] In another specific embodiment, polypeptides, antibodies, polynucleotides and/or agonists or antagonists of the present invention are used as a therapy for chronic hypergammaglobulinemia evident in such diseases as monoclonal gammopathy of undetermined significance (MGUS), Waldenstrom's disease, related idiopathic monoclonal gammopathies, and plasmacytomas.

[0538] In another specific embodiment, polypeptides, antibodies, polynucleotides and/or agonists or antagonists of the present invention may be employed for instance to inhibit polypeptide chemotaxis and activation of macrophages and their precursors, and of neutrophils, basophils, B lymphocytes and some T-cell subsets, e.g., activated and CD8 cytotoxic T cells and natural killer cells, in certain autoimmune and chronic inflammatory and infective diseases. Examples of autoimmune diseases are described herein and include multiple sclerosis, and insulin-dependent diabetes.

[0539] The polypeptides, antibodies, polynucleotides and/or agonists or antagonists of the present invention may also be employed to treat idiopathic hyper-eosinophilic syndrome by, for example, preventing eosinophil production and migration.

[0540] In another specific embodiment, polypeptides, antibodies, polynucleotides and/or agonists or antagonists of the present invention are used to enhance or inhibit complement mediated cell lysis.

[0541] In another specific embodiment, polypeptides, antibodies, polynucleotides and/or agonists or antagonists of the present invention are used to enhance or inhibit antibody dependent cellular cytotoxicity.

[0542] In another specific embodiment, polypeptides, antibodies, polynucleotides and/or agonists or antagonists of the present invention may also be employed for treating atherosclerosis, for example, by preventing monocyte infiltration in the artery wall.

[0543] In another specific embodiment, polypeptides, antibodies, polynucleotides and/or agonists or antagonists of the present invention may be employed to treat adult respiratory distress syndrome (ARDS).

[0544] In another specific embodiment, polypeptides, antibodies, polynucleotides and/or agonists or antagonists of the present invention may be useful for stimulating wound and tissue repair, stimulating angiogenesis, and/or stimulating the repair of vascular or lymphatic diseases or disorders. Additionally, agonists and antagonists of the invention may be used to stimulate the regeneration of mucosal surfaces.

[0545] In a specific embodiment, polynucleotides or polypeptides, and/or agonists thereof are used to diagnose, prognose, treat, and/or prevent a disorder characterized by primary or acquired immunodeficiency, deficient serum immunoglobulin production, recurrent infections, and/or immune system dysfunction. Moreover, polynucleotides or polypeptides, and/or agonists thereof may be used to treat or prevent infections of the joints, bones, skin, and/or parotid glands, blood-borne infections (e.g., sepsis, meningitis, septic arthritis, and/or osteomyelitis), autoimmune diseases (e.g., those disclosed herein), inflammatory disorders, and malignancies, and/or any disease or disorder or condition associated with these infections, diseases, disorders and/or malignancies) including, but not limited to, CVID, other primary immune deficiencies, HIV disease, CLL, recurrent bronchitis, sinusitis, otitis media, conjunctivitis, pneumonia, hepatitis, meningitis, herpes zoster (e.g., severe herpes zoster), and/or pneumocystis camii. Other diseases and disorders that may be prevented, diagnosed, prognosed, and/or treated with polynucleotides or polypeptides, and/or agonists of the present invention include, but are not limited to, HIV infection, HTLV-BLV infection, lymphopenia, phagocyte bactericidal dysfunction anemia, thrombocytopenia, and hemoglobinuria.

[0546] In another embodiment, polynucleotides, polypeptides, antibodies, and/or agonists or antagonists of the present invention are used to treat, and/or diagnose an individual having common variable immunodeficiency disease (“CVID”; also known as “acquired agammaglobulinemia” and “acquired hypogammaglobulinemia”) or a subset of this disease.

[0547] In a specific embodiment, polynucleotides, polypeptides, antibodies, and/or agonists or antagonists of the present invention may be used to diagnose, prognose, prevent, and/or treat cancers or neoplasms including immune cell or immune tissue-related cancers or neoplasms. Examples of cancers or neoplasms that may be prevented, diagnosed, or treated by polynucleotides, polypeptides, antibodies, and/or agonists or antagonists of the present invention include, but are not limited to, acute myelogenous leukemia, chronic myelogenous leukemia, Hodgkin's disease, non-Hodgkin's lymphoma, acute lymphocytic anemia (ALL) Chronic lymphocyte leukemia, plasmacytomas, multiple myeloma, Burkitt's lymphoma, EBV-transformed diseases, and/or diseases and disorders described in the section entitled “Hyperproliferative Disorders” elsewhere herein.

[0548] In another specific embodiment, polypeptides, antibodies, polynucleotides and/or agonists or antagonists of the present invention are used as a therapy for decreasing cellular proliferation of Large B-cell Lymphomas.

[0549] In another specific embodiment, polypeptides, antibodies, polynucleotides and/or agonists or antagonists of the present invention are used as a means of decreasing the involvement of B cells and Ig associated with Chronic Myelogenous Leukemia.

[0550] In specific embodiments, the compositions of the invention are used as an agent to boost immunoresponsiveness among B cell immunodeficient individuals, such as, for example, an individual who has undergone a partial or complete splenectomy.

[0551] Antagonists of the invention include, for example, binding and/or inhibitory antibodies, antisense nucleic acids, ribozymes or soluble forms of the polypeptides of the present invention (e.g., Fc fusion protein; see, e.g., Example 9). Agonists of the invention include, for example, binding or stimulatory antibodies, and soluble forms of the polypeptides (e.g., Fc fusion proteins; see, e.g., Example 9). polypeptides, antibodies, polynucleotides and/or agonists or antagonists of the present invention may be employed in a composition with a pharmaceutically acceptable carrier, e.g., as described herein.

[0552] In another embodiment, polypeptides, antibodies, polynucleotides and/or agonists or antagonists of the present invention are administered to an animal (including, but not limited to, those listed above, and also including transgenic animals) incapable of producing functional endogenous antibody molecules or having an otherwise compromised endogenous immune system, but which is capable of producing human immunoglobulin molecules by means of a reconstituted or partially reconstituted immune system from another animal (see, e.g., published PCT Application Nos. WO98/24893, WO/9634096, WO/9633735, and WO/9110741). Administration of polypeptides, antibodies, polynucleotides and/or agonists or antagonists of the present invention to such animals is useful for the generation of monoclonal antibodies against the polypeptides, antibodies, polynucleotides and/or agonists or antagonists of the present invention.

[0553] Blood-Related Disorders

[0554] The polynucleotides, polypeptides, antibodies, and/or agonists or antagonists of the present invention may be used to modulate hemostatic (the stopping of bleeding) or thrombolytic (clot dissolving) activity. For example, by increasing hemostatic or thrombolytic activity, polynucleotides or polypeptides, and/or agonists or antagonists of the present invention could be used to treat or prevent blood coagulation diseases, disorders, and/or conditions (e.g., afibrinogenemia, factor deficiencies, hemophilia), blood platelet diseases, disorders, and/or conditions (e.g., thrombocytopenia), or wounds resulting from trauma, surgery, or other causes. Alternatively, polynucleotides, polypeptides, antibodies, and/or agonists or antagonists of the present invention that can decrease hemostatic or thrombolytic activity could be used to inhibit or dissolve clotting. These molecules could be important in the treatment or prevention of heart attacks (infarction), strokes, or scarring.

[0555] In specific embodiments, the polynucleotides, polypeptides, antibodies, and/or agonists or antagonists of the present invention may be used to prevent, diagnose, prognose, and/or treat thrombosis, arterial thrombosis, venous thrombosis, thromboembolism, pulmonary embolism, atherosclerosis, myocardial infarction, transient ischemic attack, unstable angina. In specific embodiments, the polynucleotides, polypeptides, antibodies, and/or agonists or antagonists of the present invention may be used for the prevention of occulsion of saphenous grafts, for reducing the risk of periprocedural thrombosis as might accompany angioplasty procedures, for reducing the risk of stroke in patients with atrial fibrillation including nonrheumatic atrial fibrillation, for reducing the risk of embolism associated with mechanical heart valves and or mitral valves disease. Other uses for the polynucleotides, polypeptides, antibodies, and/or agonists or antagonists of the present invention, include, but are not limited to, the prevention of occlusions in extrcorporeal devices (e.g., intravascular canulas, vascular access shunts in hemodialysis patients, hemodialysis machines, and cardiopulmonary bypass machines).

[0556] In another embodiment, a polypeptide of the invention, or polynucleotides, antibodies, agonists, or antagonists corresponding to that polypeptide, may be used to prevent, diagnose, prognose, and/or treat diseases and disorders of the blood and/or blood forming organs associated with the tissue(s) in which the polypeptide of the invention is expressed, including one, two, three, four, five, or more tissues disclosed in Table 1A, column 8 (Tissue Distribution Library Code).

[0557] The polynucleotides, polypeptides, antibodies, and/or agonists or antagonists of the present invention may be used to modulate hematopoietic activity (the formation of blood cells). For example, the polynucleotides, polypeptides, antibodies, and/or agonists or antagonists of the present invention may be used to increase the quantity of all or subsets of blood cells, such as, for example, erythrocytes, lymphocytes (B or T cells), myeloid cells (e.g., basophils, eosinophils, neutrophils, mast cells, macrophages) and platelets. The ability to decrease the quantity of blood cells or subsets of blood cells may be useful in the prevention, detection, diagnosis and/or treatment of anemias and leukopenias described below. Alternatively, the polynucleotides, polypeptides, antibodies, and/or agonists or antagonists of the present invention may be used to decrease the quantity of all or subsets of blood cells, such as, for example, erythrocytes, lymphocytes (B or T cells), myeloid cells (e.g., basophils, eosinophils, neutrophils, mast cells, macrophages) and platelets. The ability to decrease the quantity of blood cells or subsets of blood cells may be useful in the prevention, detection, diagnosis and/or treatment of leukocytoses, such as, for example eosinophilia.

[0558] The polynucleotides, polypeptides, antibodies, and/or agonists or antagonists of the present invention may be used to prevent, treat, or diagnose blood dyscrasia.

[0559] Anemias are conditions in which the number of red blood cells or amount of hemoglobin (the protein that carries oxygen) in them is below normal. Anemia may be caused by excessive bleeding, decreased red blood cell production, or increased red blood cell destruction (hemolysis). The polynucleotides, polypeptides, antibodies, and/or agonists or antagonists of the present invention may be useful in treating, preventing, and/or diagnosing anemias. Anemias that may be treated prevented or diagnosed by the polynucleotides, polypeptides, antibodies, and/or agonists or antagonists of the present invention include iron deficiency anemia, hypochromic anemia, microcytic anemia, chlorosis, hereditary siderob;astic anemia, idiopathic acquired sideroblastic anemia, red cell aplasia, megaloblastic anemia (e.g., pernicious anemia, (vitamin B12 deficiency) and folic acid deficiency anemia), aplastic anemia, hemolytic anemias (e.g., autoimmune helolytic anemia, microangiopathic hemolytic anemia, and paroxysmal nocturnal hemoglobinuria). The polynucleotides, polypeptides, antibodies, and/or agonists or antagonists of the present invention may be useful in treating, preventing, and/or diagnosing anemias associated with diseases including but not limited to, anemias associated with systemic lupus erythematosus, cancers, lymphomas, chronic renal disease, and enlarged spleens. The polynucleotides, polypeptides, antibodies, and/or agonists or antagonists of the present invention may be useful in treating, preventing, and/or diagnosing anemias arising from drug treatments such as anemias associated with methyldopa, dapsone, and/or sulfadrugs. Additionally, rhe polynucleotides, polypeptides, antibodies, and/or agonists or antagonists of the present invention may be useful in treating, preventing, and/or diagnosing anemias associated with abnormal red blood cell architecture including but not limited to, hereditary spherocytosis, hereditary elliptocytosis, glucose-6-phosphate dehydrogenase deficiency, and sickle cell anemia.

[0560] The polynucleotides, polypeptides, antibodies, and/or agonists or antagonists of the present invention may be useful in treating, preventing, and/or diagnosing hemoglobin abnormalities, (e.g., those associated with sickle cell anemia, hemoglobin C disease, hemoglobin S-C disease, and hemoglobin E disease). Additionally, the polynucleotides, polypeptides, antibodies, and/or agonists or antagonists of the present invention may be useful in diagnosing, prognosing, preventing, and/or treating thalassemias, including, but not limited to major and minor forms of alpha-thalassemia and beta-thalassemia.

[0561] In another embodiment, the polynucleotides, polypeptides, antibodies, and/or agonists or antagonists of the present invention may be useful in diagnosing, prognosing, preventing, and/or treating bleeding disorders including, but not limited to, thrombocytopenia (e.g., idiopathic thrombocytopenic purpura, and thrombotic thrombocytopenic purpura), Von Willebrand's disease, hereditary platelet disorders (e.g., storage pool disease such as Chediak-Higashi and Hermansky-Pudlak syndromes, thromboxane A2 dysfunction, thromboasthenia, and Bernard-Soulier syndrome), hemolytic-uremic syndrome, hemophelias such as hemophelia A or Factor VII deficiency and Christmas disease or Factor IX deficiency, Hereditary Hemorhhagic Telangiectsia, also known as Rendu-Osler-Weber syndrome, allergic purpura (Henoch Schonlein purpura) and disseminated intravascular coagulation.

[0562] The effect of the polynucleotides, polypeptides, antibodies, and/or agonists or antagonists of the present invention on the clotting time of blood may be monitored using any of the clotting tests known in the art including, but not limited to, whole blood partial thromboplastin time (PTT), the activated partial thromboplastin time (aPTT), the activated clotting time (ACT), the recalcified activated clotting time, or the Lee-White Clotting time.

[0563] Several diseases and a variety of drugs can cause platelet dysfunction. Thus, in a specific embodiment, the polynucleotides, polypeptides, antibodies, and/or agonists or antagonists of the present invention may be useful in diagnosing, prognosing, preventing, and/or treating acquired platelet dysfunction such as platelet dysfunction accompanying kidney failure, leukemia, multiple myeloma, cirrhosis of the liver, and systemic lupus erythematosus as well as platelet dysfunction associated with drug treatments, including treatment with aspirin, ticlopidine, nonsteroidal anti-inflammatory drugs (used for arthritis, pain, and sprains), and penicillin in high doses.

[0564] In another embodiment, the polynucleotides, polypeptides, antibodies, and/or agonists or antagonists of the present invention may be useful in diagnosing, prognosing, preventing, and/or treating diseases and disorders characterized by or associated with increased or decreased numbers of white blood cells. Leukopenia occurs when the number of white blood cells decreases below normal. Leukopenias include, but are not limited to, neutropenia and lymphocytopenia. An increase in the number of white blood cells compared to normal is known as leukocytosis. The body generates increased numbers of white blood cells during infection. Thus, leukocytosis may simply be a normal physiological parameter that reflects infection. Alternatively, leukocytosis may be an indicator of injury or other disease such as cancer. Leokocytoses, include but are not limited to, eosinophilia, and accumulations of macrophages. In specific embodiments, the polynucleotides, polypeptides, antibodies, and/or agonists or antagonists of the present invention may be useful in diagnosing, prognosing, preventing, and/or treating leukopenia. In other specific embodiments, the polynucleotides, polypeptides, antibodies, and/or agonists or antagonists of the present invention may be useful in diagnosing, prognosing, preventing, and/or treating leukocytosis.

[0565] Leukopenia may be a generalized decreased in all types of white blood cells, or may be a specific depletion of particular types of white blood cells. Thus, in specific embodiments, the polynucleotides, polypeptides, antibodies, and/or agonists or antagonists of the present invention may be useful in diagnosing, prognosing, preventing, and/or treating decreases in neutrophil numbers, known as neutropenia. Neutropenias that may be diagnosed, prognosed, prevented, and/or treated by the polynucleotides, polypeptides, antibodies, and/or agonists or antagonists of the present invention include, but are not limited to, infantile genetic agranulocytosis, familial neutropenia, cyclic neutropenia, neutropenias resulting from or associated with dietary deficiencies (e.g., vitamin B 12 deficiency or folic acid deficiency), neutropenias resulting from or associated with drug treatments (e.g., antibiotic regimens such as penicillin treatment, sulfonamide treatment, anticoagulant treatment, anticonvulsant drugs, anti-thyroid drugs, and cancer chemotherapy), and neutropenias resulting from increased neutrophil destruction that may occur in association with some bacterial or viral infections, allergic disorders, autoimmune diseases, conditions in which an individual has an enlarged spleen (e.g., Felty syndrome, malaria and sarcoidosis), and some drug treatment regimens.

[0566] The polynucleotides, polypeptides, antibodies, and/or agonists or antagonists of the present invention may be useful in diagnosing, prognosing, preventing, and/or treating lymphocytopenias (decreased numbers of B and/or T lymphocytes), including, but not limited lymphocytopenias resulting from or associated with stress, drug treatments (e.g., drug treatment with corticosteroids, cancer chemotherapies, and/or radiation therapies), AIDS infection and/or other diseases such as, for example, cancer, rheumatoid arthritis, systemic lupus erythematosus, chronic infections, some viral infections and/or hereditary disorders (e.g., DiGeorge syndrome, Wiskott-Aldrich Syndome, severe combined immunodeficiency, ataxia telangiectsia).

[0567] The polynucleotides, polypeptides, antibodies, and/or agonists or antagonists of the present invention may be useful in diagnosing, prognosing, preventing, and/or treating diseases and disorders associated with macrophage numbers and/or macrophage function including, but not limited to, Gaucher's disease, Niemann-Pick disease, Letterer-Siwe disease and Hand-Schuller-Christian disease.

[0568] In another embodiment, the polynucleotides, polypeptides, antibodies, and/or agonists or antagonists of the present invention may be useful in diagnosing, prognosing, preventing, and/or treating diseases and disorders associated with eosinophil numbers and/or eosinophil function including, but not limited to, idiopathic hypereosinophilic syndrome, eosinophilia-myalgia syndrome, and Hand-Schuller-Christian disease.

[0569] In yet another embodiment, the polynucleotides, polypeptides, antibodies, and/or agonists or antagonists of the present invention may be useful in diagnosing, prognosing, preventing, and/or treating leukemias and lymphomas including, but not limited to, acute lymphocytic (lymphpblastic) leukemia (ALL), acute myeloid (myelocytic, myelogenous, myeloblastic, or myelomonocytic) leukemia, chronic lymphocytic leukemia (e.g., B cell leukemias, T cell leukemias, Sezary syndrome, and Hairy cell leukenia), chronic myelocytic (myeloid, myelogenous, or granulocytic) leukemia, Hodgkin's lymphoma, non-hodgkin's lymphoma, Burkitt's lymphoma, and mycosis fungoides.

[0570] In other embodiments, the polynucleotides, polypeptides, antibodies, and/or agonists or antagonists of the present invention may be useful in diagnosing, prognosing, preventing, and/or treating diseases and disorders of plasma cells including, but not limited to, plasma cell dyscrasias, monoclonal gammaopathies, monoclonal gammopathies of undetermined significance, multiple myeloma, macroglobulinemia, Waldenstrom's macroglobulinemia, cryoglobulinemia, and Raynaud's phenomenon.

[0571] In other embodiments, the polynucleotides, polypeptides, antibodies, and/or agonists or antagonists of the present invention may be useful in treating, preventing, and/or diagnosing myeloproliferative disorders, including but not limited to, polycythemia vera, relative polycythemia, secondary polycythemi a, myelo fibrosis, acute myelofibrosis, agnogenic myelod metaplasia, thrombocythemia, (including both primary and seconday thrombocythemia) and chronic myelocytic leukemia.

[0572] In other embodiments, the polynucleotides, polypeptides, antibodies, and/or agonists or antagonists of the present invention may be useful as a treatment prior to surgery, to increase blood cell production.

[0573] In other embodiments, the polynucleotides, polypeptides, antibodies, and/or agonists or antagonists of the present invention may be useful as an agent to enhance the migration, phagocytosis, superoxide production, antibody dependent cellular cytotoxicity of neutrophils, eosionophils and macrophages.

[0574] In other embodiments, the polynucleotides, polypeptides, antibodies, and/or agonists or antagonists of the present invention may be useful as an agent to increase the number of stem cells in circulation prior to stem cells pheresis. In another specific embodiment, the polynucleotides, polypeptides, antibodies, and/or agonists or antagonists of the present invention may be useful as an agent to increase the number of stem cells in circulation prior to platelet pheresis.

[0575] In other embodiments, the polynucleotides, polypeptides, antibodies, and/or agonists or antagonists of the present invention may be useful as an agent to increase cytokine production.

[0576] In other embodiments, the polynucleotides, polypeptides, antibodies, and/or agonists or antagonists of the present invention may be useful in preventing, diagnosing, and/or treating primary hematopoietic disorders.

[0577] Hyperproliferative Disorders

[0578] In certain embodiments, polynucleotides or polypeptides, or agonists or antagonists of the present invention can be used to treat or detect hyperproliferative disorders, including neoplasms. Polynucleotides or polypeptides, or agonists or antagonists of the present invention may inhibit the proliferation of the disorder through direct or indirect interactions. Alternatively, Polynucleotides or polypeptides, or agonists or antagonists of the present invention may proliferate other cells which can inhibit the hyperproliferative disorder.

[0579] For example, by increasing an immune response, particularly increasing antigenic qualities of the hyperproliferative disorder or by proliferating, differentiating, or mobilizing T-cells, hyperproliferative disorders can be treated. This immune response may be increased by either enhancing an existing immune response, or by initiating a new immune response. Alternatively, decreasing an immune response may also be a method of treating hyperproliferative disorders, such as a chemotherapeutic agent.

[0580] Examples of hyperproliferative disorders that can be treated or detected by polynucleotides or polypeptides, or agonists or antagonists of the. present invention include, but are not limited to neoplasms located in the: colon, abdomen, bone, breast, digestive system, liver, pancreas, peritoneum, endocrine glands (adrenal, parathyroid, pituitary, testicles, ovary, thymus, thyroid), eye, head and neck, nervous (central and peripheral), lymphatic system, pelvis, skin, soft tissue, spleen, thorax, and urogenital tract.

[0581] Similarly, other hyperproliferative disorders can also be treated or detected by polynucleotides or polypeptides, or agonists or antagonists of the present invention. Examples of such hyperproliferative disorders include, but are not limited to: Acute Childhood Lymphoblastic Leukemia, Acute Lymphoblastic Leukemia, Acute Lymphocytic Leukemia, Acute Myeloid Leukemia, Adrenocortical Carcinoma, Adult (Primary) Hepatocellular Cancer, Adult (Primary) Liver Cancer, Adult Acute Lymphocytic Leukemia, Adult Acute Myeloid Leukemia, Adult Hodgkin's Disease, Adult Hodgkin's Lymphoma, Adult Lymphocytic Leukemia, Adult Non-Hodgkin's Lymphoma, Adult Primary Liver Cancer, Adult Soft Tissue Sarcoma, AIDS-Related Lymphoma, AIDS-Related Malignancies, Anal Cancer, Astrocytoma, Bile Duct Cancer, Bladder Cancer, Bone Cancer, Brain Stem Glioma, Brain Tumors, Breast Cancer, Cancer of the Renal Pelvis and Ureter, Central Nervous System (Primary) Lymphoma, Central Nervous System Lymphoma, Cerebellar Astrocytoma, Cerebral Astrocytoma, Cervical Cancer, Childhood (Primary) Hepatocellular Cancer, Childhood (Primary) Liver Cancer, Childhood Acute Lymphoblastic Leukemia, Childhood Acute Myeloid Leukemia, Childhood Brain Stem Glioma, Childhood Cerebellar Astrocytoma, Childhood Cerebral Astrocytoma, Childhood Extracranial Germ Cell Tumors, Childhood Hodgkin's Disease, Childhood Hodgkin's Lymphoma, Childhood Hypothalamic and Visual Pathway Glioma, Childhood Lymphoblastic Leukemia, Childhood Medulloblastoma, Childhood Non-Hodgkin's Lymphoma, Childhood Pineal and Supratentorial Primitive Neuroectodermal Tumors, Childhood Primary Liver Cancer, Childhood Rhabdomyosarcoma, Childhood Soft Tissue Sarcoma, Childhood Visual Pathway and Hypothalamic Glioma, Chronic Lymphocytic Leukemia, Chronic Myelogenous Leukemia, Colon Cancer, Cutaneous T-Cell Lymphoma, Endocrine Pancreas Islet Cell Carcinoma, Endometrial Cancer, Ependymoma, Epithelial Cancer, Esophageal Cancer, Ewing's Sarcoma and Related Tumors, Exocrine Pancreatic Cancer, Extracranial Germ Cell Tumor, Extragonadal Germ Cell Tumor, Extrahepatic Bile Duct Cancer, Eye Cancer, Female Breast Cancer, Gaucher's Disease, Gallbladder Cancer, Gastric Cancer, Gastrointestinal Carcinoid Tumor, Gastrointestinal Tumors, Germ Cell Tumors, Gestational Trophoblastic Tumor, Hairy Cell Leukemia, Head and Neck Cancer, Hepatocellular Cancer, Hodgkin's Disease, Hodgkin's Lymphoma, Hypergammaglobulinemia, Hypopharyngeal Cancer, Intestinal Cancers, Intraocular Melanoma, Islet Cell Carcinoma, Islet Cell Pancreatic Cancer, Kaposi's Sarcoma, Kidney Cancer, Laryngeal Cancer, Lip and Oral Cavity Cancer, Liver Cancer, Lung Cancer, Lymphoproliferative Disorders, Macroglobulinemia, Male Breast Cancer, Malignant Mesothelioma, Malignant Thymoma, Medulloblastoma, Melanoma, Mesothelioma, Metastatic Occult Primary Squamous Neck Cancer, Metastatic Primary Squamous Neck Cancer, Metastatic Squamous Neck Cancer, Multiple Myeloma, Multiple Myeloma/Plasma Cell Neoplasm, Myelodysplastic Syndrome, Myelogenous Leukemia, Myeloid Leukemia, Myeloproliferative Disorders, Nasal Cavity and Paranasal Sinus Cancer, Nasopharyngeal Cancer, Neuroblastoma, Non-Hodgkin's Lymphoma During Pregnancy, Nonmelanoma Skin Cancer, Non-Small Cell Lung Cancer, Occult Primary Metastatic Squamous Neck Cancer, Oropharyngeal Cancer, Osteo-/Malignant Fibrous Sarcoma, Osteosarcoma/Malignant Fibrous-Histiocytoma, Osteosarcoma/Malignant Fibrous Histiocytoma of Bone, Ovarian Epithelial Cancer, Ovarian Germ Cell Tumor, Ovarian Low Malignant Potential Tumor, Pancreatic Cancer, Paraproteinemias, Purpura, Parathyroid Cancer, Penile Cancer, Pheochromocytoma, Pituitary Tumor, Plasma Cell Neoplasm/Multiple Myeloma, Primary Central Nervous System Lymphoma, Primary Liver Cancer, Prostate Cancer, Rectal Cancer, Renal Cell Cancer, Renal Pelvis and Ureter Cancer, Retinoblastoma, Rhabdomyosarcoma, Salivary Gland Cancer, Sarcoidosis Sarcomas, Sezary Syndrome, Skin Cancer, Small Cell Lung Cancer, Small Intestine Cancer, Soft Tissue Sarcoma, Squamous Neck Cancer, Stomach Cancer, Supratentorial Primitive Neuroectodermal and Pineal Tumors, T-Cell Lymphoma, Testicular Cancer, Thymoma, Thyroid Cancer, Transitional Cell Cancer of the Renal Pelvis and Ureter, Transitional Renal Pelvis and Ureter Cancer, Trophoblastic Tumors, Ureter and Renal Pelvis Cell Cancer, Urethral Cancer, Uterine Cancer, Uterine Sarcoma, Vaginal Cancer, Visual Pathway and Hypothalamic Glioma, Vulvar Cancer, Waldenstrom's Macroglobulinemia, Wilms' Tumor, and any other hyperproliferative disease, besides neoplasia, located in an organ system listed above.

[0582] In another preferred embodiment, polynucleotides or polypeptides, or agonists or antagonists of the present invention are used to diagnose, prognose, prevent, and/or treat premalignant conditions and to prevent progression to a neoplastic or malignant state, including but not limited to those disorders described above. Such uses are indicated in conditions known or suspected of preceding progression to neoplasia or cancer, in particular, where non-neoplastic cell growth consisting of hyperplasia, metaplasia, or most particularly, dysplasia has occurred (for review of such abnormal growth conditions, see Robbins and Angell, 1976, Basic Pathology, 2d Ed., W. B. Saunders Co., Philadelphia, pp. 68-79.)

[0583] Hyperplasia is a form of controlled cell proliferation, involving an increase in cell number in a tissue or organ, without significant alteration in structure or function. Hyperplastic disorders which can be diagnosed, prognosed, prevented, and/or treated with compositions of the invention (including polynucleotides, polypeptides, agonists or antagonists) include, but are not limited to, angiofollicular mediastinal lymph node hyperplasia, angiolymphoid hyperplasia with eosinophilia, a typical melanocytic hyperplasia, basal cell hyperplasia, benign giant lymph node hyperplasia, cementum hyperplasia, congenital adrenal hyperplasia, congenital sebaceous hyperplasia, cystic hyperplasia, cystic hyperplasia of the breast, denture hyperplasia, ductal hyperplasia, endometrial hyperplasia, fibromuscular hyperplasia, focal epithelial hyperplasia, gingival hyperplasia, inflammatory fibrous hyperplasia, inflammatory papillary hyperplasia, intravascular papillary endothelial hyperplasia, nodular hyperplasia of prostate, nodular regenerative hyperplasia, pseudoepitheliomatous hyperplasia, senile sebaceous hyperplasia, and verrucous hyperplasia.

[0584] Metaplasia is a form of controlled cell growth in which one type of adult or fully differentiated cell substitutes for another type of adult cell. Metaplastic disorders which can be diagnosed, prognosed, prevented, and/or treated with compositions of the invention (including polynucleotides, polypeptides, agonists or antagonists) include, but are not limited to, agnogenic myeloid metaplasia, apocrine metaplasia, a typical metaplasia, autoparenchymatous metaplasia, connective tissue metaplasia, epithelial metaplasia, intestinal metaplasia, metaplastic anemia, metaplastic ossification, metaplastic polyps, myeloid metaplasia, primary myeloid metaplasia, secondary myeloid metaplasia, squamous metaplasia, squamous metaplasia of amnion, and symptomatic myeloid metaplasia.

[0585] Dysplasia is frequently a forerunner of cancer, and is found mainly in the epithelia; it is the most disorderly form of non-neoplastic cell growth, involving a loss in individual cell uniformity and in the architectural orientation of cells. Dysplastic cells often have abnormally large, deeply stained nuclei, and exhibit pleomorphism. Dysplasia characteristically occurs where there exists chronic irritation or inflammation. Dysplastic disorders which can be diagnosed, prognosed, prevented, and/or treated with compositions of the invention (including polynucleotides, polypeptides, agonists or antagonists) include, but are not limited to, anhidrotic ectodermal dysplasia, anterofacial dysplasia, asphyxiating thoracic dysplasia, atriodigital dysplasia, bronchopulmonary dysplasia, cerebral dysplasia, cervical dysplasia, chondroectodermal dysplasia, cleidocranial dysplasia, congenital ectodermal dysplasia, craniodiaphysial dysplasia, craniocarpotarsal dysplasia, craniometaphysial dysplasia, dentin dysplasia, diaphysial dysplasia, ectodermal dysplasia, enamel dysplasia, encephalo-ophthalmic dysplasia, dysplasia epiphysialis hemimelia, dysplasia epiphysialis multiplex, dysplasia epiphysialis punctata, epithelial dysplasia, faciodigitogenital dysplasia, familial fibrous dysplasia of jaws, familial white folded dysplasia, fibromuscular dysplasia, fibrous dysplasia of bone, florid osseous dysplasia, hereditary renal-retinal dysplasia, hidrotic ectodermal dysplasia, hypohidrotic ectodermal dysplasia, lymphopenic thymic dysplasia, mammary dysplasia, mandibulofacial dysplasia, metaphysial dysplasia, Mondini dysplasia, monostotic fibrous dysplasia, mucoepithelial dysplasia, multiple epiphysial dysplasia, oculoauriculovertebral dysplasia, oculodentodigital dysplasia, oculovertebral dysplasia, odontogenic dysplasia, ophthalmomandibulomelic dysplasia, periapical cemental dysplasia, polyostotic fibrous dysplasia, pseudoachondroplastic spondyloepiphysial dysplasia, retinal dysplasia, septo-optic dysplasia, spondyloepiphysial dysplasia, and ventriculoradial dysplasia.

[0586] Additional pre-neoplastic disorders which can be diagnosed, prognosed, prevented, and/or treated with, compositions of the invention (including polynucleotides, polypeptides, agonists or antagonists) include, but are not limited to, benign dysproliferative disorders (e.g., benign tumors, fibrocystic conditions, tissue hypertrophy, intestinal polyps, colon polyps, and esophageal dysplasia), leukoplakia, keratoses, Bowen's disease, Farmer's Skin, solar cheilitis, and solar keratosis.

[0587] In another embodiment, a polypeptide of the invention, or polynucleotides, antibodies, agonists, or antagonists corresponding to that polypeptide, may be used to diagnose and/or prognose disorders associated with the tissue(s) in which the polypeptide of the invention is expressed, including one, two, three, four, five, or more tissues disclosed in Table 1A, column 8 (Tissue Distribution Library Code).

[0588] In another embodiment, polynucleotides, polypeptides, antibodies, and/or agonists or antagonists of the present invention conjugated to a toxin or a radioactive isotope, as described herein, may be used to treat cancers and neoplasms, including, but not limited to those described herein. In a further preferred embodiment, polynucleotides, polypeptides, antibodies, and/or agonists or antagonists of the present invention conjugated to a toxin or a radioactive isotope, as described herein, may be used to treat acute myelogenous leukemia.

[0589] Additionally, polynucleotides, polypeptides, and/or agonists or antagonists of the invention may affect apoptosis, and therefore, would be useful in treating a number of diseases associated with increased cell survival or the inhibition of apoptosis. For example, diseases associated with increased cell survival or the inhibition of apoptosis that could be diagnosed, prognosed, prevented, and/or treated by polynucleotides, polypeptides, and/or agonists or antagonists of the invention, include cancers (such as follicular lymphomas, carcinomas with p53 mutations, and hormone-dependent tumors, including, but not limited to colon cancer, cardiac tumors, pancreatic cancer, melanoma, retinoblastoma, glioblastoma, lung cancer, intestinal cancer, testicular cancer, stomach cancer, neuroblastoma, myxoma, myoma, lymphoma, endothelioma, osteoblastoma, osteoclastoma, osteosarcoma, chondrosarcoma, adenoma, breast cancer, prostate cancer, Kaposi's sarcoma and ovarian cancer); autoimmune disorders such as, multiple sclerosis, Sjogren's syndrome, Hashimoto's thyroiditis, biliary cirrhosis, Behcet's disease, Crohn's disease, polymyositis, systemic lupus erythematosus and immune-related glomerulonephritis and rheumatoid arthritis) and viral infections (such as herpes viruses, pox viruses and adenoviruses), inflammation, graft v. host disease, acute graft rejection, and chronic graft rejection.

[0590] In preferred embodiments, polynucleotides, polypeptides, and/or agonists or antagonists of the invention are used to inhibit growth, progression, and/or metastasis of cancers, in particular those listed above.

[0591] Additional diseases or conditions associated with increased cell survival that could be diagnosed, prognosed, prevented, and/or treated by polynucleotides, polypeptides, and/or agonists or antagonists of the invention, include, but are not limited to, progression, and/or metastases of malignancies and related disorders such as leukemia (including acute leukemias (e.g., acute lymphocytic leukemia, acute myelocytic leukemia (including myeloblastic, promyelocytic, myelomonocytic, monocytic, and erythroleukemia)) and chronic leukemias (e.g., chronic myelocytic (granulocytic) leukemia and chronic lymphocytic leukemia)), polycythemia vera, lymphomas (e.g., Hodgkin's disease and non-Hodgkin's disease), multiple myeloma, Waldenstrom's macroglobulinemia, heavy chain disease, and solid tumors including, but not limited to, sarcomas and carcinomas such as fibrosarcoma, myxosarcoma, liposarcoma, chondrosarcoma, osteogenic sarcoma, chordoma, angiosarcoma, endotheliosarcoma, lymphangiosarcoma, lymphangioendotheliosarcoma, synovioma, mesothelioma, Ewing's tumor, leiomyosarcoma, rhabdomyosarcoma, colon carcinoma, pancreatic cancer, breast cancer, ovarian cancer, prostate cancer, squamous cell carcinoma, basal cell carcinoma, adenocarcinoma, sweat gland carcinoma, sebaceous gland carcinoma, papillary carcinoma, papillary adenocarcinomas, cystadenocarcinoma, medullary carcinoma, bronchogenic carcinoma, renal cell carcinoma, hepatoma, bile duct carcinoma, choriocarcinoma, seminoma, embryonal carcinoma, Wilm's tumor, cervical cancer, testicular tumor, lung carcinoma, small cell lung carcinoma, bladder carcinoma, epithelial carcinoma, glioma, astrocytoma, medulloblastoma, craniopharyngioma, ependymoma, pinealoma, emangioblastoma, acoustic neuroma, oligodendroglioma, menangioma, melanoma, neuroblastoma, and retinoblastoma.

[0592] Diseases associated with increased apoptosis that could be diagnosed, prognosed, prevented, and/or treated by polynucleotides, polypeptides, and/or agonists or antagonists of the invention, include AIDS; neurodegenerative disorders (such as Alzheimer's disease, Parkinson's disease, amyotrophic lateral sclerosis, retinitis pigmentosa, cerebellar degeneration and brain tumor or prior associated disease); autoimmune disorders (such as, multiple sclerosis, Sjogren's syndrome, Hashimoto's thyroiditis, biliary cirrhosis, Behcet's disease, Crohn's disease, polymyositis, systemic lupus erythematosus and immune-related glomerulonephritis and rheumatoid arthritis) myelodysplastic syndromes-(such as aplastic anemia), graft v. host disease, ischemic injury (such as that caused by myocardial infarction, stroke and reperfusion injury), liver injury (e.g., hepatitis related liver injury, ischemia/reperfusion injury, cholestosis (bile duct injury) and liver cancer); toxin-induced liver disease (such as that caused by alcohol), septic shock, cachexia and anorexia.

[0593] Hyperproliferative diseases and/or disorders that could be diagnosed, prognosed, prevented, and/or treated by polynucleotides, polypeptides, and/or agonists or antagonists of the invention, include, but are not limited to, neoplasms located in the liver, abdomen, bone, breast, digestive system, pancreas, peritoneum, endocrine glands (adrenal, parathyroid, pituitary, testicles, ovary, thymus, thyroid), eye, head and neck, nervous system (central and peripheral), lymphatic system, pelvis, skin, soft tissue, spleen, thorax, and urogenital tract.

[0594] Similarly, other hyperproliferative disorders can also be diagnosed, prognosed, prevented, and/or treated by polynucleotides, polypeptides, and/or agonists or antagonists of the invention. Examples of such hyperproliferative disorders include, but are not limited to: hypergammaglobulinemia, lymphoproliferative disorders, paraproteinemias, purpura, sarcoidosis, Sezary Syndrome, Waldenstron's macroglobulinemia, Gaucher's Disease, histiocytosis, and any other hyperproliferative disease, besides neoplasia, located in an organ system listed above.

[0595] Another preferred embodiment utilizes polynucleotides of the present invention to inhibit aberrant cellular division, by gene therapy using the present invention, and/or protein fusions or fragments thereof.

[0596] Thus, the present invention provides a method for treating cell proliferative disorders by inserting into an abnormally proliferating cell a polynucleotide of the present invention, wherein said polynucleotide represses said expression.

[0597] Another embodiment of the present invention provides a method of treating cell-proliferative disorders in individuals comprising administration of one or more active gene copies of the present invention to an abnormally proliferating cell or cells. In a preferred embodiment, polynucleotides of the present invention is a DNA construct comprising a recombinant expression vector effective in expressing a DNA sequence encoding said polynucleotides. In another preferred embodiment of the present invention, the DNA construct encoding the poynucleotides of the present invention is inserted into cells to be treated utilizing a retrovirus, or more preferably an adenoviral vector (See G J. Nabel, et. al., PNAS 1999 96: 324-326, which is hereby incorporated by reference). In a most preferred embodiment, the viral vector is defective and will not transform non-proliferating cells, only proliferating cells. Moreover, in a preferred embodiment, the polynucleotides of the present invention inserted into proliferating cells either alone, or in combination with or fused to other polynucleotides, can then be modulated via an external stimulus (i.e. magnetic, specific small molecule, chemical, or drug administration, etc.), which acts upon the promoter upstream of said polynucleotides to induce expression of the encoded protein product. As such the beneficial therapeutic affect of the present invention may be expressly modulated (i.e. to increase, decrease, or inhibit expression of the present invention) based upon said external stimulus.

[0598] Polynucleotides of the present invention may be useful in repressing expression of oncogenic genes or antigens. By “repressing expression of the oncogenic genes” is intended the suppression of the transcription of the gene, the degradation of the gene transcript (pre-message RNA), the inhibition of splicing, the destruction of the messenger RNA, the prevention of the post-translational modifications of the protein, the destruction of the protein, or the inhibition of the normal function of the protein.

[0599] For local administration to abnormally proliferating cells, polynucleotides of the present invention may be administered by any method known to those of skill in the art including, but not limited to transfection, electroporation, microinjection of cells, or in vehicles such as liposomes, lipofectin, or as naked polynucleotides, or any other method described throughout the specification. The polynucleotide of the present invention may be delivered by known gene delivery systems such as, but not limited to, retroviral vectors (Gilboa, J. Virology 44:845 (1982); Hocke, Nature 320:275 (1986); Wilson, et al., Proc. Natl. Acad. Sci. U.S.A. 85:3014), vaccinia virus system (Chakrabarty et al., Mol. Cell Biol. 5:3403 (1985) or other efficient DNA delivery systems (Yates et al., Nature 313:812 (1985)) known to those skilled in the art. These references are exemplary only and are hereby incorporated by reference. In order to specifically deliver or transfect cells which are abnormally proliferating and spare non-dividing cells, it is preferable to utilize a retrovirus, or adenoviral (as described in the art and elsewhere herein) delivery system known to those of skill in the art. Since host DNA replication is required for retroviral DNA to integrate and the retrovirus will be unable to self replicate due to the lack of the retrovirus genes needed for its life cycle. Utilizing such a retroviral delivery system for polynucleotides of the present invention will target said gene and constructs to abnormally proliferating cells and will spare the non-dividing normal cells.

[0600] The polynucleotides of the present invention may be delivered directly to cell proliferative disorder/disease sites in internal organs, body cavities and the like by use of imaging devices used to guide an injecting needle directly to the disease site. The polynucleotides of the present invention may also be administered to disease sites at the time of surgical intervention.

[0601] By “cell proliferative disease” is meant any human or animal disease or disorder, affecting any one or any combination of organs, cavities, or body parts, which is characterized by single or multiple local abnormal proliferations of cells, groups of cells, or tissues, whether benign or malignant.

[0602] Any amount of the polynucleotides of the present invention may be administered as long as it has a biologically inhibiting effect on the proliferation of the treated cells. Moreover, it is possible to administer more than one of the polynucleotide of the present invention simultaneously to the same site. By “biologically inhibiting” is meant partial or total growth inhibition as well as decreases in the rate of proliferation or growth of the cells. The biologically inhibitory dose may be determined by assessing the effects of the polynucleotides of the present invention on target malignant or abnormally proliferating cell growth in tissue culture, tumor growth in animals and cell cultures, or any other method known to one of ordinary skill in the art.

[0603] The present invention is further directed to antibody-based therapies which involve administering of anti-polypeptides and anti-polynucleotide antibodies to a mammalian, preferably human, patient for treating one or more of the described disorders. Methods for producing anti-polypeptides and anti-polynucleotide antibodies polyclonal and monoclonal antibodies are described in detail elsewhere herein. Such antibodies may be provided in pharmaceutically acceptable compositions as known in the art or as described herein.

[0604] A summary of the ways in which the antibodies of the present invention may be used therapeutically includes binding polynucleotides or polypeptides of the present invention locally or systemically in the body or by direct cytotoxicity of the antibody, e.g. as mediated by complement (CDC) or by effector cells (ADCC). Some of these approaches are described in more detail below. Armed with the teachings provided herein, one of ordinary skill in the art will know how to use the antibodies of the present invention for diagnostic, monitoring or therapeutic purposes without undue experimentation.

[0605] In particular, the antibodies, fragments and derivatives of the present invention are useful for treating a subject having or developing cell proliferative and/or differentiation disorders as described herein. Such treatment comprises administering a single or multiple doses of the antibody, or a fragment, derivative, or a conjugate thereof.

[0606] The antibodies of this invention may be advantageously utilized in combination with other monoclonal or chimeric antibodies, or with lymphokines or hematopoietic growth factors, for example., which serve to increase the number or activity of effector cells which interact with the antibodies.

[0607] It is preferred to use high affinity and/or potent in vivo inhibiting and/or neutralizing antibodies against polypeptides or polynucleotides of the present invention, fragments or regions thereof, for both immunoassays directed to and therapy of disorders related to polynucleotides or polypeptides, including fragements thereof, of the present invention. Such antibodies, fragments, or regions, will preferably have an affinity for polynucleotides or polypeptides, including fragements thereof. Preferred binding affinities include those with a dissociation constant or Kd less than 5×10⁻⁶M, 10⁻⁶M, 5×10⁻⁷M, 10⁻⁷M, 5×10⁸M, 10⁻⁸M, 5×10⁻⁹M, 10⁻⁹M, 5×10⁻¹⁰M, 10⁻¹⁰M, 5×10⁻¹¹M, 10⁻¹¹M, 5×10⁻¹²M, 10⁻¹²M, 5×10⁻¹³M, 10⁻¹³M, 5×10⁻¹⁴M, 10⁻¹⁴M, 5×10⁻¹⁵M, and 10⁻¹⁵M.

[0608] Moreover, polypeptides of the present invention are useful in inhibiting the angiogenesis of proliferative cells or tissues, either alone, as a protein fusion, or in combination with other polypeptides directly or indirectly, as described elsewhere herein. In a most preferred embodiment, said anti-angiogenesis effect may be achieved indirectly, for example, through the inhibition of hematopoietic, tumor-specific cells, such as tumor-associated macrophages (See Joseph I B, et al. J Natl Cancer Inst, 90(21):1648-53 (1998), which is hereby incorporated by reference). Antibodies directed to polypeptides or polynucleotides of the present invention may also result in inhibition of angiogenesis directly, or indirectly (See Witte L, et al., Cancer Metastasis Rev. 17(2):155-61 (1998), which is hereby incorporated by reference)).

[0609] Polypeptides, including protein fusions, of the present invention, or fragments thereof may be useful in inhibiting proliferative cells or tissues through the induction of apoptosis. Said polypeptides may act either directly, or indirectly to induce apoptosis of proliferative cells and tissues, for example in the activation of a death-domain receptor, such as tumor necrosis factor (TNF) receptor-1, CD95 (Fas/APO-1), TNF-receptor-related apoptosis-mediated protein (TRAMP) and TNF-related apoptosis-inducing ligand (TRAIL) receptor-1 and -2 (See Schulze-Osthoff K, et.al., Eur J Biochem 254(3):439-59 (1998), which is hereby incorporated by reference). Moreover, in another preferred embodiment of the present invention, said polypeptides may induce apoptosis through other mechanisms, such as in the activation of other proteins which will activate apoptosis, or through stimulating the expression of said proteins, either alone or in combination with small molecule drugs or adjuviants, such as apoptonin, galectins, thioredoxins, anti-inflammatory proteins (See for example, Mutat Res 400(1-2):447-55 (1998), Med Hypotheses.50(5):423-33 (1998), Chem Biol Interact. Apr 24;111-112:23-34 (1998), J Mol Med.76(6):402-12 (1998), Int J Tissue React;20(1):3-15 (1998), which are all hereby incorporated by reference).

[0610] Polypeptides, including protein fusions to, or fragments thereof, of the present invention are useful in inhibiting the metastasis of proliferative cells or tissues. Inhibition may occur as a direct result of administering polypeptides, or antibodies directed to said polypeptides as described elsewere herein, or indirectly, such as activating the expression of proteins known to inhibit metastasis, for example alpha 4 integrins, (See, e.g., Curr Top Microbiol Immunol 1998;231:125-41, which is hereby incorporated by reference). Such thereapeutic affects of the present invention may be achieved either alone, or in combination with small molecule drugs or adjuvants.

[0611] In another embodiment, the invention provides a method of delivering compositions containing the polypeptides of the invention (e.g., compositions containing polypeptides or polypeptide antibodes associated with heterologous polypeptides, heterologous nucleic acids, toxins, or prodrugs) to targeted cells expressing the polypeptide of the present invention. Polypeptides or polypeptide antibodes of the invention may be associated with with heterologous polypeptides, heterologous nucleic acids, toxins, or prodrugs via hydrophobic, hydrophilic, ionic and/or covalent interactions.

[0612] Polypeptides, protein fusions to, or fragments thereof, of the present invention are useful in enhancing the immunogenicity and/or antigenicity of proliferating cells or tissues, either directly, such as would occur if the polypeptides of the present invention ‘vaccinated’ the immune response to respond to proliferative antigens and immunogens, or indirectly, such as in activating the expression of proteins known to enhance the immune response (e.g. chemokines), to said antigens and immunogens.

[0613] Renal Disorders

[0614] Polynucleotides, polypeptides, antibodies, and/or agonists or antagonists of the present invention, may be used to treat, prevent, diagnose, and/or prognose disorders of the renal system. Renal disorders which can be diagnosed, prognosed, prevented, and/or treated with compositions of the invention include, but are not limited to, kidney failure, nephritis, blood vessel disorders of kidney, metabolic and congenital kidney disorders, urinary disorders of the kidney, autoimmune disorders, sclerosis and necrosis, electrolyte imbalance, and kidney cancers.

[0615] Kidney diseases which can be diagnosed, prognosed, prevented, and/or treated with compositions of the invention include, but are not limited to, acute kidney failure, chronic kidney failure, atheroembolic renal failure, end-stage renal disease, inflammatory diseases of the kidney (e.g., acute glomerulonephritis, postinfectious glomerulonephritis, rapidly progressive glomerulonephritis, nephrotic syndrome, membranous glomerulonephritis, familial nephrotic syndrome, membranoproliferative glomerulonephritis I and II, mesangial proliferative glomerulonephritis, chronic glomerulonephritis, acute tubulointerstitial nephritis, chronic tubulointerstitial nephritis, acute post-streptococcal glomerulonephritis (PSGN), pyelonephritis, lupus nephritis, chronic nephritis, interstitial nephritis, and post-streptococcal glomerulonephritis), blood vessel disorders of the kidneys (e.g., kidney infarction, atheroembolic kidney disease, cortical necrosis, malignant nephrosclerosis, renal vein thrombosis, renal underperfusion, renal retinopathy, renal ischemia-reperfusion, renal artery embolism, and renal artery stenosis), and kidney disorders resulting form urinary tract disease (e.g., pyelonephritis, hydronephrosis, urolithiasis (renal lithiasis, nephrolithiasis), reflux nephropathy, urinary tract infections, urinary retention, and acute or chronic unilateral obstructive uropathy.)

[0616] In addition, compositions of the invention can be used to diagnose, prognose, prevent, and/or treat metabolic and congenital disorders of the kidney (e.g., uremia, renal amyloidosis, renal osteodystrophy, renal tubular acidosis, renal glycosuria, nephrogenic diabetes insipidus, cystinuria, Fanconi's syndrome, renal fibrocystic osteosis (renal rickets), Hartnup disease, Bartter's syndrome, Liddle's syndrome, polycystic kidney disease, medullary cystic disease, medullary sponge kidney, Alport's syndrome, nail-patella syndrome, congenital nephrotic syndrome, CRUSH syndrome, horseshoe kidney, diabetic nephropathy, nephrogenic diabetes insipidus, analgesic nephropathy, kidney stones, and membranous nephropathy), and autoimmune disorders of the kidney (e.g., systemic lupus erythematosus (SLE), Goodpasture syndrome, IgA nephropathy, and IgM mesangial proliferative glomerulonephritis).

[0617] Compositions of the invention can also be used to diagnose, prognose, prevent, and/or treat sclerotic or necrotic disorders of the kidney (e.g., glomerulosclerosis, diabetic nephropathy, focal segmental glomerulosclerosis (FSGS), necrotizing glomerulonephritis, and renal papillary necrosis), cancers of the kidney (e.g., nephroma, hypemephroma, nephroblastoma, renal cell cancer, transitional cell cancer, renal adenocarcinoma, squamous cell cancer, and Wilm's tumor), and electrolyte imbalances (e.g., nephrocalcinosis, pyuria, edema, hydronephritis, proteinuria, hyponatremia, hypernatremia, hypokalemia, hyperkalemia, hypocalcemia, hypercalcemia, hypophosphatemia, and hyperphosphatemia).

[0618] Polypeptides may be administered using any method known in the art, including, but not limited to, direct needle injection at the delivery site, intravenous injection, topical administration, catheter infusion, biolistic injectors, particle accelerators, gelfoam sponge depots, other commercially available depot materials, osmotic pumps, oral or suppositorial solid pharmaceutical formulations, decanting or topical applications during surgery, aerosol delivery. Such methods are known in the art. Polypeptides may be administered as part of a Therapeutic, described in more detail below. Methods of delivering polynucleotides are described in more detail herein.

[0619] Cardiovascular Disorders

[0620] Polynucleotides or polypeptides, or agonists or antagonists of the present invention, may be used to treat, prevent, diagnose, and/or prognose cardiovascular disorders, including, but not limited to, peripheral artery disease, such as limb ischemia.

[0621] Cardiovascular disorders include, but are not limited to, cardiovascular abnormalities, such as arterio-arterial fistula, arterioyenous fistula, cerebral arterioyenous malformations, congenital heart defects, pulmonary atresia, and Scimitar Syndrome. Congenital heart defects include, but are not limited to, aortic coarctation, cor triatriatum, coronary vessel anomalies, crisscross heart, dextrocardia, patent ductus arteriosus, Ebstein's anomaly, Eisenmenger complex, hypoplastic left heart syndrome, levocardia, tetralogy of fallot, transposition of great vessels, double outlet right ventricle, tricuspid atresia, persistent truncus arteriosus, and heart septal defects, such as aortopulmonary septal defect, endocardial cushion defects, Lutembacher's Syndrome, trilogy of Fallot, ventricular heart septal defects.

[0622] Cardiovascular disorders also include, but are not limited to, heart disease, such as arrhythmias, carcinoid heart disease, high cardiac output, low cardiac output, cardiac tamponade, endocarditis (including bacterial), heart aneurysm, cardiac arrest, congestive heart failure, congestive cardiomyopathy, paroxysmal dyspnea, cardiac edema, heart hypertrophy, congestive cardiomyopathy, left ventricular hypertrophy, right ventricular hypertrophy, post-infarction heart rupture, ventricular septal rupture, heart valve diseases, myocardial diseases, myocardial ischemia, pericardial effusion, pericarditis (including constrictive and tuberculous), pneumopericardium, postpericardiotomy syndrome, pulmonary heart disease, rheumatic heart disease, ventricular dysfunction, hyperemia, cardiovascular pregnancy complications, Scimitar Syndrome, cardiovascular syphilis, and cardiovascular tuberculosis.

[0623] Arrhythmias include, but are not limited to, sinus arrhythmia, atrial fibrillation, atrial flutter, bradycardia, extrasystole, Adams-Stokes Syndrome, bundle-branch block, sinoatrial block, long QT syndrome, parasystole, Lown-Ganong-Levine Syndrome, Mahaim-type pre-excitation syndrome, Wolff-Parkinson-White syndrome, sick sinus syndrome, tachycardias, and ventricular fibrillation. Tachycardias include paroxysmal tachycardia, supraventricular tachycardia, accelerated idioventricular rhythm, atrioventricular nodal reentry tachycardia, ectopic atrial tachycardia, ectopic junctional tachycardia, sinoatrial nodal reentry tachycardia, sinus tachycardia, Torsades de Pointes, and ventricular tachycardia.

[0624] Heart valve diseases include, but are not limited to, aortic valve insufficiency, aortic valve stenosis, hear murmurs, aortic valve prolapse, mitral valve prolapse, tricuspid valve prolapse, mitral valve insufficiency, mitral valve stenosis, pulmonary atresia, pulmonary valve insufficiency, pulmonary valve stenosis, tricuspid atresia, tricuspid valve insufficiency, and tricuspid valve stenosis.

[0625] Myocardial diseases include, but are not limited to, alcoholic cardiomyopathy, congestive cardiomyopathy, hypertrophic cardiomyopathy, aortic subvalvular stenosis, pulmonary subvalvular stenosis, restrictive cardiomyopathy, Chagas cardiomyopathy, endocardial fibroelastosis, endomyocardial fibrosis, Kearns Syndrome, myocardial reperfusion injury, and myocarditis.

[0626] Myocardial ischemias include, but are not limited to, coronary disease, such as angina pectoris, coronary aneurysm, coronary arteriosclerosis, coronary thrombosis, coronary vasospasm, myocardial infarction and myocardial stunning.

[0627] Cardiovascular diseases also include vascular diseases such as aneurysms, angiodysplasia, angiomatosis, bacillary angiomatosis, Hippel-Lindau Disease, Klippel-Trenaunay-Weber Syndrome, Sturge-Weber Syndrome, angioneurotic edema, aortic diseases, Takayasu's Arteritis, aortitis, Leriche's Syndrome, arterial occlusive diseases, arteritis, enarteritis, polyarteritis nodosa, cerebrovascular disorders, diabetic angiopathies, diabetic retinopathy, embolisms, thrombosis, erythromelalgia, hemorrhoids, hepatic veno-occlusive disease, hypertension, hypotension, ischemia, peripheral vascular diseases, phlebitis, pulmonary veno-occlusive disease, Raynaud's disease, CREST syndrome, retinal vein occlusion, Scimitar syndrome, superior vena cava syndrome, telangiectasia, atacia telangiectasia, hereditary hemorrhagic telangiectasia, varicocele, varicose veins, varicose ulcer, vasculitis, and venous insufficiency.

[0628] Aneurysms include, but are not limited to, dissecting aneurysms, false aneurysms, infected aneurysms, ruptured aneurysms, aortic aneurysms, cerebral aneurysms, coronary aneurysms, heart aneurysms, and iliac aneurysms.

[0629] Arterial occlusive diseases include, but are not limited to, arteriosclerosis, intermittent claudication, carotid stenosis, fibromuscular dysplasias, mesenteric vascular occlusion, Moyamoya disease, renal artery obstruction, retinal artery occlusion, and thromboangiitis obliterans.

[0630] Cerebrovascular disorders include, but are not limited to, carotid artery diseases, cerebral amyloid angiopathy, cerebral aneurysm, cerebral anoxia, cerebral arteriosclerosis, cerebral arterioyenous malformation, cerebral artery diseases, cerebral embolism and thrombosis, carotid artery thrombosis, sinus thrombosis, Wallenberg's syndrome, cerebral hemorrhage, epidural hematoma, subdural hematoma, subaraxhnoid hemorrhage, cerebral infarction, cerebral ischemia (including transient), subclavian steal syndrome, periventricular leukomalacia, vascular headache, cluster headache, migraine, and vertebrobasilar insufficiency.

[0631] Embolisms include, but are not limited to, air embolisms, amniotic fluid embolisms, cholesterol embolisms, blue toe syndrome, fat embolisms, pulmonary embolisms, and thromoboembolisms. Thrombosis include, but are not limited to, coronary thrombosis, hepatic vein thrombosis, retinal vein occlusion, carotid artery thrombosis, sinus thrombosis, Wallenberg's syndrome, and thrombophlebitis.

[0632] Ischemic disorders include, but are not limited to, cerebral ischemia, ischemic colitis, compartment syndromes, anterior compartment syndrome, myocardial ischemia, reperfusion injuries, and peripheral limb ischemia. Vasculitis includes, but is not limited to, aortitis, arteritis, Behcet's Syndrome, Churg-Strauss Syndrome, mucocutaneous lymph node syndrome, thromboangiitis obliterans, hypersensitivity vasculitis, Schoenlein-Henoch purpura, allergic cutaneous vasculitis, and Wegener's granulomatosis.

[0633] Polypeptides may be administered using any method known in the art, including, but not limited to, direct needle injection at the delivery site, intravenous injection, topical administration, catheter infusion, biolistic injectors, particle accelerators, gelfoam sponge depots, other commercially available depot materials, osmotic pumps, oral or suppositorial solid pharmaceutical formulations, decanting or topical applications during surgery, aerosol delivery. Such methods are known in the art. Polypeptides may be administered as part of a Therapeutic, described in more detail below. Methods of delivering polynucleotides are described in more detail herein.

[0634] Respiratory Disorders

[0635] Polynucleotides or polypeptides, or agonists or antagonists of the present invention may be used to treat, prevent, diagnose, and/or prognose diseases and/or disorders of the respiratory system.

[0636] Diseases and disorders of the respiratory system include, but are not limited to, nasal vestibulitis, nonallergic rhinitis (e.g., acute rhinitis, chronic rhinitis, atrophic rhinitis, vasomotor rhinitis), nasal polyps, and sinusitis, juvenile angiofibromas, cancer of the nose and juvenile papillomas, vocal cord polyps, nodules (singer's nodules), contact ulcers, vocal cord paralysis, laryngoceles, pharyngitis (e.g., viral and bacterial), tonsillitis, tonsillar cellulitis, parapharyngeal abscess, laryngitis, laryngoceles, and throat cancers (e.g., cancer of the nasopharynx, tonsil cancer, larynx cancer), lung cancer (e.g., squamous cell carcinoma, small cell (oat cell) carcinoma, large cell carcinoma, and adenocarcinoma), allergic disorders (eosinophilic pneumonia, hypersensitivity pneumonitis (e.g., extrinsic allergic alveolitis, allergic interstitial pneumonitis, organic dust pneumoconiosis, allergic bronchopulmonary aspergillosis, asthma, Wegener's granulomatosis (granulomatous vasculitis), Goodpasture's syndrome)), pneumonia (e.g., bacterial pneumonia (e.g., Streptococcus pneumoniae (pneumoncoccal pneumonia), Staphylococcus aureus (staphylococcal pneumonia), Gram-negative bacterial pneumonia (caused by, e.g., Klebsiella and Pseudomas spp.), Mycoplasma pneumoniae pneumonia, Hemophilus influenzae pneumonia, Legionella pneumophila (Legionnaires' disease), and Chlamydia psittaci (Psittacosis)), and viral pneumonia (e.g., influenza, chickenpox (varicella).

[0637] Additional diseases and disorders of the respiratory system include, but are not limited to bronchiolitis, polio (poliomyelitis), croup, respiratory syncytial viral infection, mumps, erythema infectiosum (fifth disease), roseola infantum, progressive rubella panencephalitis, german measles, and subacute sclerosing panencephalitis), fungal pneumonia (e.g., Histoplasmosis, Coccidioidomycosis, Blastomycosis, fungal infections in people with severely suppressed immune systems (e.g., cryptococcosis, caused by Cryptococcus neoformans; aspergillosis, caused by Aspergillus spp.; candidiasis, caused by Candida; and mucormycosis)), Pneumocystis carinii (pneumocystis pneumonia), atypical pneumonias (e.g., Mycoplasma and Chlamydia spp.), opportunistic infection pneumonia, nosocomial pneumonia, chemical pneumonitis, and aspiration pneumonia, pleural disorders (e.g., pleurisy, pleural effusion, and pneumothorax (e.g., simple spontaneous pneumothorax, complicated spontaneous. pneumothorax, tension pneumothorax)), obstructive airway diseases (e.g., asthma, chronic obstructive pulmonary disease (COPD), emphysema, chronic or acute bronchitis), occupational lung diseases (e.g., silicosis, black lung (coal workers' pneumoconiosis), asbestosis, berylliosis, occupational asthsma, byssinosis, and benign pneumoconioses), Infiltrative Lung Disease (e.g., pulmonary fibrosis (e.g., fibrosing alveolitis, usual interstitial pneumonia), idiopathic pulmonary fibrosis, desquamative interstitial pneumonia, lymphoid interstitial pneumonia, histiocytosis X (e.g., Letterer-Siwe disease, Hand-Schüller-Christian disease, eosinophilic granuloma), idiopathic pulmonary hemosiderosis, sarcoidosis and pulmonary alveolar proteinosis), Acute respiratory distress syndrome (also called, e.g., adult respiratory distress syndrome), edema, pulmonary embolism, bronchitis (e.g., viral, bacterial), bronchiectasis, atelectasis, lung abscess (caused by, e.g., Staphylococcus aureus or Legionella pneumophila), and cystic fibrosis.

[0638] Anti-Angiogenesis Activity

[0639] The naturally occurring balance between endogenous stimulators and inhibitors of angiogenesis is one in which inhibitory influences predominate. Rastinejad et al., Cell 56:345-355 (1989). In those rare instances in which neovascularization occurs under normal physiological conditions, such as wound healing, organ regeneration, embryonic development, and female reproductive processes, angiogenesis is stringently regulated and spatially and temporally delimited. Under conditions of pathological angiogenesis such as that characterizing solid tumor growth, these regulatory controls fail. Unregulated angiogenesis becomes pathologic and sustains progression of many neoplastic and non-neoplastic diseases. A number of serious diseases are dominated by abnormal neovascularization including solid tumor growth and metastases, arthritis, some types of eye disorders, and psoriasis. See, e.g., reviews by Moses et al., Biotech. 9:630-634 (1991); Folkman et al., N. Engl. J. Med., 333:1757-1763 (1995); Auerbach et al., J. Microvasc. Res. 29:401-411 (1985); Folkman, Advances in Cancer Research, eds. Klein and Weinhouse, Academic Press, New York, pp. 175-203 (1985); Patz, Am. J. Opthalmol. 94:715-743 (1982); and Folkman et al., Science 221:719-725 (1983). In a number of pathological conditions, the process of angiogenesis contributes to the disease state. For example, significant data have accumulated which suggest that the growth of solid tumors is dependent on angiogenesis. Folkman and Klagsbrun, Science 235:442-447 (1987).

[0640] The present invention provides for treatment of diseases or disorders associated with neovascularization by administration of the polynucleotides and/or polypeptides of the invention, as well as agonists or antagonists of the present invention. Malignant and metastatic conditions which can be treated with the polynucleotides and polypeptides, or agonists or antagonists of the invention include, but are not limited to, malignancies, solid tumors, and cancers described herein and otherwise known in the art (for a review of such disorders, see Fishman et al., Medicine, 2d Ed., J. B. Lippincott Co., Philadelphia (1985)). Thus, the present invention provides a method of treating an angiogenesis-related disease and/or disorder, comprising administering to an individual in need thereof a therapeutically effective amount of a polynucleotide, polypeptide, antagonist and/or agonist of the invention. For example, polynucleotides, polypeptides, antagonists and/or agonists may be utilized in a variety of additional methods in order to therapeutically treat a cancer or tumor. Cancers which may be treated with polynucleotides, polypeptides, antagonists and/or agonists include, but are not limited to solid tumors, including prostate, lung, breast, ovarian, stomach, pancreas, larynx, esophagus, testes, liver, parotid, biliary tract, colon, rectum, cervix, uterus, endometrium, kidney, bladder, thyroid cancer; primary tumors and metastases; melanomas; glioblastoma; Kaposi's sarcoma; leiomyosarcoma; non-small cell lung cancer; colorectal cancer; advanced malignancies; and blood born tumors such as leukemias. For example, polynucleotides, polypeptides, antagonists and/or agonists may be delivered topically, in order to treat cancers such as skin cancer, head and neck tumors, breast tumors, and Kaposi's sarcoma.

[0641] Within yet other aspects, polynucleotides, polypeptides, antagonists and/or agonists may be utilized to treat superficial forms of bladder cancer by, for example, intravesical administration. Polynucleotides, polypeptides, antagonists and/or agonists may be delivered directly into the tumor, or near the tumor site, via injection or a catheter. Of course, as the artisan of ordinary skill will appreciate, the appropriate mode of administration will vary according to the cancer to be treated. Other modes of delivery are discussed herein.

[0642] Polynucleotides, polypeptides, antagonists and/or agonists may be useful in treating other disorders, besides cancers, which involve angiogenesis. These disorders include, but are not limited to: benign tumors, for example hemangiomas, acoustic neuromas, neurofibromas, trachomas, and pyogenic granulomas; artheroscleric plaques; ocular angiogenic diseases, for example, diabetic retinopathy, retinopathy of prematurity, macular degeneration, corneal graft rejection, neovascular glaucoma, retrolental fibroplasia, rubeosis, retinoblastoma, uvietis and Pterygia (abnormal blood vessel growth) of the eye; rheumatoid arthritis; psoriasis; delayed wound healing; endometriosis; vasculogenesis; granulations; hypertrophic scars (keloids); nonunion fractures; scleroderma; trachoma; vascular adhesions; myocardial angiogenesis; coronary. collaterals; cerebral collaterals; arterioyenous malformations; ischemic limb angiogenesis; Osler-Webber Syndrome; plaque neovascularization; telangiectasia; hemophiliac joints; angiofibroma; fibromuscular dysplasia; wound granulation; Crohn's disease; and atherosclerosis.

[0643] For example, within one aspect of the present invention methods are provided for treating hypertrophic scars and keloids, comprising the step of administering a polynucleotide, polypeptide, antagonist and/or agonist of the invention to a hypertrophic scar or keloid.

[0644] Within one embodiment of the present invention polynucleotides, polypeptides, antagonists and/or agonists of the invention are directly injected into a hypertrophic scar or keloid, in order to prevent the progression of these lesions. This therapy is of particular value in the prophylactic treatment of conditions which are known to result in the development of hypertrophic scars and keloids (e.g., bums), and is preferably initiated after the proliferative phase has had time to progress (approximately 14 days after the initial injury), but before hypertrophic scar or keloid development. As noted above, the present invention also provides methods for treating neovascular diseases of the eye, including for example, corneal neovascularization, neovascular glaucoma, proliferative diabetic retinopathy, retrolental fibroplasia and macular degeneration.

[0645] Moreover, Ocular disorders associated with neovascularization which can be treated with the polynucleotides and polypeptides of the present invention (including agonists and/or antagonists) include, but are not limited to: neovascular glaucoma, diabetic retinopathy, retinoblastoma, retrolental fibroplasia, uveitis, retinopathy of prematurity macular degeneration, corneal graft neovascularization, as well as other eye inflammatory diseases, ocular tumors and diseases associated with choroidal or iris neovascularization. See, e.g., reviews by Waltman et al., Am. J. Ophthal. 85:704-710 (1978) and Gartner et al., Surv. Ophthal. 22:291-312 (1978).

[0646] Thus, within one aspect of the present invention methods are provided for treating neovascular diseases of the eye such as corneal neovascularization (including corneal graft neovascularization), comprising the step of administering to a patient a therapeutically effective amount of a compound (as described above) to the cornea, such that the formation of blood vessels is inhibited. Briefly, the cornea is a tissue which normally lacks blood vessels. In certain pathological conditions however, capillaries may extend into the cornea from the pericorneal vascular plexus of the limbus. When the cornea becomes vascularized, it also becomes clouded, resulting in a decline in the patient's visual acuity. Visual loss may become complete if the cornea completely opacitates. A wide variety of disorders can result in corneal neovascularization, including for example, corneal infections (e.g., trachoma, herpes simplex keratitis, leishmaniasis and onchocerciasis), immunological processes (e.g., graft rejection and Stevens-Johnson's syndrome), alkali burns, trauma, inflammation (of any cause), toxic and nutritional deficiency states, and as a complication of wearing contact lenses.

[0647] Within particularly preferred embodiments of the invention, may be prepared for topical administration in saline (combined with any of the preservatives and antimicrobial agents commonly used in ocular preparations), and administered in eyedrop form. The solution or suspension may be prepared in its pure form and administered several times daily. Alternatively, anti-angiogenic compositions, prepared as described above, may also be administered directly to the cornea. Within preferred embodiments, the anti-angiogenic composition is prepared with a muco-adhesive polymer which binds to cornea. Within further embodiments, the anti-angiogenic factors or anti-angiogenic compositions may be utilized as an adjunct to conventional steroid therapy. Topical therapy may also be useful prophylactically in comeal lesions which are known to have a high probability of inducing an angiogenic response (such as chemical burns). In these instances the treatment, likely in combination with steroids, may be instituted immediately to help prevent subsequent complications.

[0648] Within other embodiments, the compounds described above may be injected directly into the corneal stroma by an ophthalmologist under microscopic guidance. The preferred site of injection may vary with the morphology of the individual lesion, but the goal of the administration would be to place the composition at the advancing front of the vasculature (i.e., interspersed between the blood vessels and the normal cornea). In most cases this would involve perilimbic corneal injection to “protect” the cornea from the advancing blood vessels. This method may also be utilized shortly after a corneal insult in order to prophylactically prevent corneal neovascularization. In this situation the material could be injected in the perilimbic cornea interspersed between the corneal lesion and its undesired potential limbic blood supply. Such methods may also be utilized in a similar fashion to prevent capillary invasion of transplanted comeas. In a sustained-release form injections might only be required 2-3 times per year. A steroid could also be added to the injection solution to reduce inflammation resulting from the injection itself.

[0649] Within another aspect of the present invention, methods are provided for treating neovascular glaucoma, comprising the step of administering to a patient a therapeutically effective amount of a polynucleotide, polypeptide, antagonist and/or agonist to the eye, such that the formation of blood vessels is inhibited. In one embodiment, the compound may be administered topically to the eye in order to treat early forms of neovascular glaucoma. Within other embodiments, the compound may be implanted by injection into the region of the anterior chamber angle. Within other embodiments, the compound may also be placed in any location such that the compound is continuously released into the aqueous humor. Within another aspect of the present invention, methods are provided for treating proliferative diabetic retinopathy, comprising the step of administering to a patient a therapeutically effective amount of a polynucleotide, polypeptide, antagonist and/or agonist to the eyes, such that the formation of blood vessels is inhibited.

[0650] Within particularly preferred embodiments of the invention, proliferative diabetic retinopathy may be treated by injection into the aqueous humor or the vitreous, in order to increase the local concentration of the polynucleotide, polypeptide, antagonist and/or agonist in the retina. Preferably, this treatment should be initiated prior to the acquisition of severe disease requiring photocoagulation.

[0651] Within another aspect of the present invention, methods are provided for treating retrolental fibroplasia, comprising the step of administering to a patient a therapeutically effective amount of a polynucleotide, polypeptide, antagonist and/or agonist to the eye, such that the formation of blood vessels is inhibited. The compound may be administered topically, via intravitreous injection and/or via intraocular implants.

[0652] Additionally, disorders which can be treated with the polynucleotides, polypeptides, agonists and/or agonists include, but are not limited to, hemangioma, arthritis, psoriasis, angiofibroma, atherosclerotic plaques, delayed wound healing, granulations, hemophilic joints, hypertrophic scars, nonunion fractures, Osler-Weber syndrome, pyogenic granuloma, scleroderma, trachoma, and vascular adhesions.

[0653] Moreover, disorders and/or states, which can be treated, prevented, diagnosed, and/or prognosed with the the polynucleotides, polypeptides, agonists and/or agonists of the invention include, but are not limited to, solid tumors, blood born tumors such as leukemias, tumor metastasis, Kaposi's sarcoma, benign tumors, for example hemangiomas, acoustic neuromas, neurofibromas, trachomas, and pyogenic granulomas, rheumatoid arthritis, psoriasis, ocular angiogenic diseases, for example, diabetic retinopathy, retinopathy of prematurity, macular degeneration, corneal graft rejection, neovascular glaucoma, retrolental fibroplasia, rubeosis, retinoblastoma, and uvietis, delayed wound healing, endometriosis, vascluogenesis, granulations, hypertrophic scars (keloids), nonunion fractures, scleroderma, trachoma, vascular adhesions, myocardial angiogenesis, coronary collaterals, cerebral collaterals, arterioyenous malformations, ischemic limb angiogenesis, Osler-Webber Syndrome, plaque neovascularization, telangiectasia, hemophiliac joints, angiofibroma fibromuscular dysplasia, wound granulation, Crohn's disease, atherosclerosis, birth control agent by preventing vascularization required for embryo implantation controlling menstruation, diseases that have angiogenesis as a pathologic consequence such as cat scratch disease (Rochele minalia quintosa), ulcers (Helicobacter pylori), Bartonellosis and bacillary angiomatosis.

[0654] In one aspect of the birth control method, an amount of the compound sufficient to block embryo implantation is administered before or after intercourse and fertilization have occurred, thus providing an effective method of birth control, possibly a “morning after” method. Polynucleotides, polypeptides, agonists and/or agonists may also be used in controlling menstruation or administered as either a peritoneal lavage fluid or for peritoneal implantation in the treatment of endometriosis.

[0655] Polynucleotides, polypeptides, agonists and/or agonists of the present invention may be incorporated into surgical sutures in order to prevent stitch granulomas.

[0656] Polynucleotides, polypeptides, agonists and/or agonists may be utilized in a wide variety of surgical procedures. For example, within one aspect of the present invention a compositions (in the form of, for example, a spray or film) may be utilized to coat or spray an area prior to removal of a tumor, in order to isolate normal surrounding tissues from malignant tissue, and/or to prevent the spread of disease to surrounding tissues. Within other aspects of the present invention, compositions (e.g., in the form of a spray) may be delivered via endoscopic procedures in order to coat tumors, or inhibit angiogenesis in a desired locale. Within yet other aspects of the present invention, surgical meshes which have been coated with anti-angiogenic compositions of the present invention may be utilized in any procedure wherein a surgical mesh might be utilized. For example, within one embodiment of the invention a surgical mesh laden with an anti-angiogenic composition may be utilized during abdominal cancer resection surgery (e.g., subsequent to colon resection) in order to provide support to the structure, and to release an amount of the anti-angiogenic factor.

[0657] Within further aspects of the present invention, methods are provided for treating tumor excision sites, comprising administering a polynucleotide, polypeptide, agonist and/or agonist to the resection margins of a tumor subsequent to excision, such that the local recurrence of cancer and the formation of new blood vessels at the site is inhibited. Within one embodiment of the invention, the anti-angiogenic compound is administered directly to the tumor excision site (e.g., applied by swabbing, brushing or otherwise coating the resection margins of the tumor with the anti-angiogenic compound). Alternatively, the anti-angiogenic compounds may be incorporated into known surgical pastes prior to administration. Within particularly preferred embodiments of the invention, the anti-angiogenic compounds are applied after hepatic resections for malignancy, and after neurosurgical operations.

[0658] Within one aspect of the present invention, polynucleotides, polypeptides, agonists and/or agonists may be administered to the resection margin of a wide variety of tumors, including for example, breast, colon, brain and hepatic tumors. For example, within one embodiment of the invention, anti-angiogenic compounds may be administered to the site of a neurological tumor subsequent to excision, such that the formation of new blood vessels at the site are inhibited.

[0659] The polynucleotides, polypeptides, agonists and/or agonists of the present invention may also be administered along with other anti-angiogenic factors. Representative examples of other anti-angiogenic factors include: Anti-Invasive Factor, retinoic acid and derivatives thereof, paclitaxel, Suramin, Tissue Inhibitor of Metalloproteinase-1, Tissue Inhibitor of Metalloproteinase-2, Plasminogen Activator Inhibitor-1, Plasminogen Activator Inhibitor-2, and various forms of the lighter “d group” transition metals.

[0660] Lighter “d group” transition metals include, for example, vanadium, molybdenum, tungsten, titanium, niobium, and tantalum species. Such transition metal species may form transition metal complexes. Suitable complexes of the above-mentioned transition metal species include oxo transition metal complexes.

[0661] Representative examples of vanadium complexes include oxo vanadium complexes such as vanadate and vanadyl complexes. Suitable vanadate complexes include metavanadate and orthovanadate complexes such as, for example, ammonium metavanadate, sodium metavanadate, and sodium orthovanadate. Suitable vanadyl complexes include, for example, vanadyl acetylacetonate and vanadyl sulfate including vanadyl sulfate hydrates such as vanadyl sulfate mono- and trihydrates.

[0662] Representative examples of tungsten and molybdenum complexes also include oxo complexes. Suitable oxo tungsten complexes include tungstate and tungsten oxide complexes. Suitable tungstate complexes include ammonium tungstate, calcium tungstate, sodium tungstate dihydrate, and tungstic acid. Suitable tungsten oxides include tungsten (IV) oxide and tungsten (VI) oxide. Suitable oxo molybdenum complexes include molybdate, molybdenum oxide, and molybdenyl complexes. Suitable molybdate complexes include ammonium molybdate and its hydrates, sodium molybdate and its hydrates, and potassium molybdate and its hydrates. Suitable molybdenum oxides include molybdenum (VI) oxide, molybdenum (VI) oxide, and molybdic acid. Suitable molybdenyl complexes include, for example, molybdenyl acetylacetonate. Other suitable tungsten and molybdenum complexes include hydroxo derivatives derived from, for example, glycerol, tartaric acid, and sugars.

[0663] A wide variety of other anti-angiogenic factors may also be utilized within the context of the present invention. Representative examples include platelet factor 4; protamine sulphate; sulphated chitin derivatives (prepared from queen crab shells), (Murata et al., Cancer Res. 51:22-26, 1991); Sulphated Polysaccharide Peptidoglycan Complex (SP-PG) (the function of this compound may be enhanced by the presence of steroids such as estrogen, and tamoxifen citrate); Staurosporine; modulators of matrix metabolism, including for example, proline analogs, cishydroxyproline, d,L-3,4-dehydroproline, Thiaproline, alpha,alpha-dipyridyl, aminopropionitrile fumarate; 4-propyl-5-(4-pyridinyl)-2(3H)-oxazolone; Methotrexate; Mitoxantrone; Heparin; Interferons; 2 Macroglobulin-serum; ChIMP-3 (Pavloff et al., J. Bio. Chem. 267:17321-17326, 1992); Chymostatin (Tomkinson et al., Biochem J. 286:475-480, 1992); Cyclodextrin Tetradecasulfate; Eponemycin; Camptothecin; Fumagillin (Ingber et al., Nature 348:555-557, 1990); Gold Sodium Thiomalate (“GST”; Matsubara and Ziff, J. Clin. Invest. 79:1440-1446, 1987); anticollagenase-serum; alpha2-antiplasmin (Holmes et al., J. Biol. Chem. 262(4):1659-1664, 1987); Bisantrene (National Cancer Institute); Lobenzarit disodium (N-(2)-carboxyphenyl-4-chloroanthronilic acid disodium or “CCA”; Takeuchi et al., Agents Actions 36:312-316, 1992); Thalidomide; Angostatic steroid; AGM-1470; carboxynaminolmidazole; and metalloproteinase inhibitors such as BB94.

[0664] Diseases at the Cellular Level

[0665] Diseases associated with increased cell survival or the inhibition of apoptosis that could be treated, prevented, diagnosed, and/or prognosed using polynucleotides or polypeptides, as well as antagonists or agonists of the present invention, include cancers (such as follicular lymphomas, carcinomas with p53 mutations, and hormone-dependent tumors, including, but not limited to colon cancer, cardiac tumors, pancreatic cancer, melanoma, retinoblastoma, glioblastoma, lung cancer, intestinal cancer, testicular cancer, stomach cancer, neuroblastoma, myxoma, myoma, lymphoma, endothelioma, osteoblastoma, osteoclastoma, osteosarcoma, chondrosarcoma, adenoma, breast cancer, prostate cancer, Kaposi's sarcoma and ovarian cancer); autoimmune disorders (such as, multiple sclerosis, Sjogren's syndrome, Hashimoto's thyroiditis, biliary cirrhosis, Behcet's disease, Crohn's disease, polymyositis, systemic lupus erythematosus and immune-related glomerulonephritis and rheumatoid arthritis) and viral infections (such as herpes viruses, pox viruses and adenoviruses), inflammation, graft v. host disease, acute graft rejection, and chronic graft rejection.

[0666] In preferred embodiments, polynucleotides, polypeptides, and/or antagonists of the invention are used to inhibit growth, progression, and/or metasis of cancers, in particular those listed above.

[0667] Additional diseases or conditions associated with increased cell survival that could be treated or detected by polynucleotides or polypeptides, or agonists or antagonists of the present invention include, but are not limited to, progression, and/or metastases of malignancies and related disorders such as leukemia (including acute leukemias (e.g., acute lymphocytic leukemia, acute myelocytic leukemia (including myeloblastic, promyelocytic, myelomonocytic, monocytic, and erythroleukemia)) and chronic leukemias (e.g., chronic myelocytic (granulocytic) leukemia and chronic lymphocytic leukemia)), polycythemia vera, lymphomas (e.g., Hodgkin's disease and non-Hodgkin's disease), multiple myeloma, Waldenstrom's macroglobulinemia, heavy chain disease, and solid tumors including, but not limited to, sarcomas and carcinomas such as fibrosarcoma, myxosarcoma, liposarcoma, chondrosarcoma, osteogenic sarcoma, chordoma, angiosarcoma, endotheliosarcoma, lymphangiosarcoma, lymphangioendotheliosarcoma, synovioma, mesothelioma, Ewing's tumor, leiomyosarcoma, rhabdomyosarcoma, colon carcinoma, pancreatic cancer, breast cancer, ovarian cancer, prostate cancer, squamous cell carcinoma, basal cell carcinoma, adenocarcinoma, sweat gland carcinoma, sebaceous gland carcinoma, papillary carcinoma, papillary adenocarcinomas, cystadenocarcinoma, medullary carcinoma, bronchogenic carcinoma, renal cell carcinoma, hepatoma, bile duct carcinoma, choriocarcinoma, seminoma, embryonal carcinoma, Wilm's tumor, cervical cancer, testicular tumor, lung carcinoma, small cell lung carcinoma, bladder carcinoma, epithelial carcinoma, glioma, astrocytoma, medulloblastoma, craniopharyngioma, ependymoma, pinealoma, hemangioblastoma, acoustic neuroma, oligodendroglioma, menangioma, melanoma, neuroblastoma, and retinoblastoma.

[0668] Diseases associated with increased apoptosis that could be treated, prevented, diagnosed, and/or prognesed using polynucleotides or polypeptides, as well as agonists or antagonists of the present invention, include, but are not limited to, AIDS; neurodegenerative disorders (such as Alzheimer's disease, Parkinson's disease, Amyotrophic lateral sclerosis, Retinitis pigmentosa, Cerebellar degeneration and brain tumor or prior associated disease); autoimmune disorders (such as, multiple sclerosis, Sjogren's syndrome, Hashimoto's thyroiditis, biliary cirrhosis, Behcet's disease, Crohn's disease, polymyositis, systemic lupus erythematosus and immune-related glomerulonephritis and rheumatoid arthritis) myelodysplastic syndromes (such as aplastic anemia), graft v. host disease, ischemic injury (such as that caused by myocardial infarction, stroke and reperfusion injury), liver injury (e.g., hepatitis related liver injury, ischemia/reperfusion injury, cholestosis (bile duct injury) and liver cancer); toxin-induced liver disease (such as that caused by alcohol), septic shock, cachexia and anorexia.

[0669] Wound Healing and Epithelial Cell Proliferation

[0670] In accordance with yet a further aspect of the present invention, there is provided a process for utilizing polynucleotides or polypeptides, as well as agonists or antagonists of the present invention, for therapeutic purposes, for example, to stimulate epithelial cell proliferation and basal keratinocytes for the purpose of wound healing, and to stimulate hair follicle production and healing of dermal wounds. Polynucleotides or polypeptides, as well as agonists or antagonists of the present invention, may be clinically useful in stimulating wound healing including surgical wounds, excisional wounds, deep wounds involving damage of the dermis and epidermis, eye tissue wounds, dental tissue wounds, oral cavity wounds, diabetic ulcers, dermal ulcers, cubitus ulcers, arterial ulcers, venous stasis ulcers, burns resulting from heat exposure or chemicals, and other abnormal wound healing conditions such as uremia, malnutrition, vitamin deficiencies and complications associated with systemic treatment with steroids, radiation therapy and antineoplastic drugs and antimetabolites. Polynucleotides or polypeptides, as well as agonists or antagonists of the present invention, could be used to promote dermal reestablishment subsequent to dermal loss

[0671] Polynucleotides or polypeptides, as well as agonists or antagonists of the present invention, could be used to increase the adherence of skin grafts to a wound bed and to stimulate re-epithelialization from the wound bed. The following are types of grafts that polynucleotides or polypeptides, agonists or antagonists of the present invention, could be used to increase adherence to a wound bed: autografts, artificial skin, allografts, autodermic graft, autoepdermic grafts, avacular grafts, Blair-Brown grafts, bone graft, brephoplastic grafts, cutis graft, delayed graft, dermic graft, epidermic graft, fascia graft, full thickness graft, heterologous graft, xenograft, homologous graft, hyperplastic graft, lamellar graft, mesh graft, mucosal graft, Ollier-Thiersch graft, omenpal graft, patch graft, pedicle graft, penetrating graft, split skin graft, thick split graft. Polynucleotides or polypeptides, as well as agonists or antagonists of the present invention, can be used to promote skin strength and to improve the appearance of aged skin.

[0672] It is believed that polynucleotides or polypeptides, as well as agonists or antagonists of the present invention, will also produce changes in hepatocyte proliferation, and epithelial cell proliferation in the lung, breast, pancreas, stomach, small intestine, and large intestine. Polynucleotides or polypeptides, as well as agonists or antagonists of the present invention, could promote proliferation of epithelial cells such as sebocytes, hair follicles, hepatocytes, type II pneumocytes, mucin-producing goblet cells, and other epithelial cells and their progenitors contained within the skin, lung, liver, and gastrointestinal tract. Polynucleotides or polypeptides, agonists or antagonists of the present invention, may promote proliferation of endothelial cells, keratinocytes, and basal keratinocytes.

[0673] Polynucleotides or polypeptides, as well as agonists or antagonists of the present invention, could also be used to reduce the side effects of gut toxicity that result from radiation, chemotherapy treatments or viral infections. Polynucleotides or polypeptides, as well as agonists or antagonists of the present invention, may have a cytoprotective effect on the small intestine mucosa. Polynucleotides or polypeptides, as well as agonists or antagonists of the present invention, may also stimulate healing of mucositis (mouth ulcers) that result from chemotherapy and viral infections.

[0674] Polynucleotides or polypeptides, as well as agonists or antagonists of the present invention, could further be used in full regeneration of skin in full and partial thickness skin defects, including burns, (i.e., repopulation of hair follicles, sweat glands, and sebaceous glands), treatment of other skin defects such as psoriasis. Polynucleotides or polypeptides, as well as agonists or antagonists of the present invention, could be used to treat epidermolysis bullosa, a defect in adherence of the epidermis to the underlying dermis which results in frequent, open and painful blisters by accelerating reepithelialization of these lesions. Polynucleotides or polypeptides, as well as agonists or antagonists of the present invention, could also be used to treat gastric and doudenal ulcers and help heal by scar formation of the mucosal lining and regeneration of glandular mucosa and duodenal mucosal lining more rapidly. Inflammatory bowel diseases, such as Crohn's disease and ulcerative colitis, are diseases which result in destruction of the mucosal surface of the small or large intestine, respectively. Thus, polynucleotides or polypeptides, as well as agonists or antagonists of the present invention, could be used to promote the resurfacing of the mucosal surface to aid more rapid healing and to prevent progression of inflammatory bowel disease. Treatment with polynucleotides or polypeptides, agonists or antagonists of the present invention, is expected to have a significant effect on the production of mucus throughout the gastrointestinal tract and could be used to protect the intestinal mucosa from injurious substances that are ingested or following surgery. Polynucleotides or polypeptides, as well as agonists or antagonists of the present invention, could be used to treat diseases associate with the under expression.

[0675] Moreover, polynucleotides or polypeptides, as well as agonists or antagonists of the present invention, could be used to prevent and heal damage to the lungs due to various pathological states. Polynucleotides or polypeptides, as well as agonists or antagonists of the present invention, which could stimulate proliferation and differentiation and promote the repair of alveoli and brochiolar epithelium to prevent or treat acute or chronic lung damage. For example, emphysema, which results in the progressive loss of aveoli, and inhalation injuries, i.e., resulting from smoke inhalation and burns, that cause necrosis of the bronchiolar epithelium and alveoli could be effectively treated using polynucleotides or polypeptides, agonists or antagonists of the present invention. Also, polynucleotides or polypeptides, as well as agonists or antagonists of the present invention, could be used to stimulate the proliferation of and differentiation of type II pneumocytes, which may help treat or prevent disease such as hyaline membrane diseases, such as infant respiratory distress syndrome and bronchopulmonary displasia, in premature infants.

[0676] Polynucleotides or polypeptides, as well as agonists or antagonists of the present invention, could stimulate the proliferation and differentiation of hepatocytes and, thus, could be used to alleviate or treat liver diseases and pathologies such as fulminant liver failure caused by cirrhosis, liver damage caused by viral hepatitis and toxic substances (i.e., acetaminophen, carbon tetraholoride and other hepatotoxins known in the art).

[0677] In addition, polynucleotides or polypeptides, as well as agonists or antagonists of the present invention, could be used treat or prevent the onset of diabetes mellitus. In patients with newly diagnosed Types I and II diabetes, where some islet cell function remains, polynucleotides or polypeptides, as well as agonists or antagonists of the present invention, could be used to maintain the islet function so as to alleviate, delay or prevent permanent manifestation of the disease. Also, polynucleotides or polypeptides, as well as agonists or antagonists of the present invention, could be used as an auxiliary in islet cell transplantation to improve or promote islet cell function.

[0678] Neural Activity and Neurological Diseases

[0679] The polynucleotides, polypeptides and agonists or antagonists of the invention may be used for the diagnosis and/or treatment of diseases, disorders, damage or injury of the brain and/or nervous system. Nervous system disorders that can be treated with the compositions of the invention (e.g., polypeptides, polynucleotides, and/or agonists or antagonists), include, but are not limited to, nervous system injuries, and diseases or disorders which result in either a disconnection of axons, a diminution or degeneration of neurons, or demyelination. Nervous system lesions which may be treated in a patient (including human and non-human mammalian patients) according to the methods of the invention, include but are not limited to, the following lesions of either the central (including spinal cord, brain) or peripheral nervous systems: (1) ischemic lesions, in which a lack of oxygen in a portion of the nervous system results in neuronal injury or death, including cerebral infarction or ischemia, or spinal cord infarction or ischemia; (2) traumatic lesions, including lesions caused by physical injury or associated with surgery, for example, lesions which sever a portion of the nervous system, or compression injuries; (3) malignant lesions, in which a portion of the nervous system is destroyed or injured by malignant tissue which is either a nervous system associated malignancy or a malignancy derived from non-nervous system tissue; (4) infectious lesions, in which a portion of the nervous system is destroyed or injured as a result of infection, for example, by an abscess or associated with infection by human immunodeficiency virus, herpes zoster, or herpes simplex virus or with Lyme disease, tuberculosis, or syphilis; (5) degenerative lesions, in which a portion of the nervous system is destroyed or injured as a result of a degenerative process including but not limited to, degeneration associated with Parkinson's disease, Alzheimer's disease, Huntington's chorea, or amyotrophic lateral sclerosis (ALS); (6) lesions associated with nutritional diseases or disorders, in which a portion of the nervous system is destroyed or injured by a nutritional disorder or disorder of metabolism including, but not limited to, vitamin B12 deficiency, folic acid deficiency, Wernicke disease, tobacco-alcohol amblyopia, Marchiafava-Bignami disease (primary degeneration of the corpus callosum), and alcoholic cerebellar degeneration; (7) neurological lesions associated with systemic diseases including, but not limited to, diabetes (diabetic neuropathy, Bell's palsy), systemic lupus erythematosus, carcinoma, or sarcoidosis; (8) lesions caused by toxic substances including alcohol, lead, or particular neurotoxins; and (9) demyelinated lesions in which a portion of the nervous system is destroyed or injured by a demyelinating disease including, but not limited to, multiple sclerosis, human immunodeficiency virus-associated myelopathy, transverse myelopathy or various etiologies, progressive multifocal leukoencephalopathy, and central pontine myelinolysis.

[0680] In one embodiment, the polypeptides, polynucleotides, or agonists or antagonists of the invention are used to protect neural cells from the damaging effects of hypoxia. In a further preferred embodiment, the polypeptides, polynucleotides, or agonists or antagonists of the invention are used to protect neural cells from the damaging effects of cerebral hypoxia. According to this embodiment, the compositions of the invention are used to treat or prevent neural cell injury associated with cerebral hypoxia. In one non-exclusive aspect of this embodiment, the polypeptides, polynucleotides, or agonists or antagonists of the invention, are used to treat or prevent neural cell injury associated with cerebral ischemia. In another non-exclusive aspect of this embodiment, the polypeptides, polynucleotides, or agonists or antagonists of the invention are used to treat or prevent neural cell injury associated with cerebral infarction.

[0681] In another preferred embodiment, the polypeptides, polynucleotides, or agonists or antagonists of the invention are used to treat or prevent neural cell injury associated with a stroke. In a specific embodiment, the polypeptides, polynucleotides, or agonists or antagonists of the invention are used to treat or prevent cerebral neural cell injury associated with a stroke.

[0682] In another preferred embodiment, the polypeptides, polynucleotides, or agonists or antagonists of the invention are used to treat or prevent neural cell injury associated with a heart attack. In a specific embodiment, the polypeptides, polynucleotides, or agonists or antagonists of the invention are used to treat or prevent cerebral neural cell injury associated with a heart attack.

[0683] The compositions of the invention which are useful for treating or preventing a nervous system disorder may be selected by testing for biological activity in promoting the survival or differentiation of neurons. For example, and not by way of limitation, compositions of the invention which elicit any of the following effects may be useful according to the invention: (1) increased survival time of neurons in culture either in the presence or absence of hypoxia or hypoxic conditions; (2) increased sprouting of neurons in culture or in vivo; (3) increased production of a neuron-associated molecule in culture or in vivo, e.g., choline acetyltransferase or acetylcholinesterase with respect to motor neurons; or (4) decreased symptoms of neuron dysfunction in vivo. Such effects may be measured by any method known in the art. In preferred, non-limiting embodiments, increased survival of neurons may routinely be measured using a method set forth herein or otherwise known in the art, such as, for example, in Zhang et al., Proc Natl Acad Sci USA 97:3637-42 (2000) or in Arakawa et al., J. Neurosci., 10:3507-15 (1990); increased sprouting of neurons may be detected by methods known in the art, such as, for example, the methods set forth in Pestronk et al., Exp. Neurol., 70:65-82 (1980), or Brown et al., Ann. Rev. Neurosci., 4:17-42 (1981); increased production of neuron-associated molecules may be measured by bioassay, enzymatic assay, antibody binding, Northern blot assay, etc., using techniques known in the art and depending on the molecule to be measured; and motor neuron dysfunction may be measured by assessing the physical manifestation of motor neuron disorder, e.g., weakness, motor neuron conduction velocity, or functional disability.

[0684] In specific embodiments, motor neuron disorders that may be treated according to the invention include, but are not limited to, disorders such as infarction, infection, exposure to toxin, trauma, surgical damage, degenerative disease or malignancy that may affect motor neurons as well as other components of the nervous system, as well as disorders that selectively affect neurons such as amyotrophic lateral sclerosis, and including, but not limited to, progressive spinal muscular atrophy, progressive bulbar palsy, primary lateral sclerosis, infantile and juvenile muscular atrophy, progressive bulbar paralysis of childhood (Fazio-Londe syndrome), poliomyelitis and the post polio syndrome, and Hereditary Motorsensory Neuropathy (Charcot-Marie-Tooth Disease).

[0685] Further, polypeptides or polynucleotides of the invention may play a role in neuronal survival; synapse formation; conductance; neural differentiation, etc. Thus, compositions of the invention (including polynucleotides, polypeptides, and agonists or antagonists) may be-used to diagnose and/or treat or prevent diseases or disorders associated with these roles, including, but not limited to, learning and/or cognition disorders. The compositions of the invention may also be useful in the treatment or prevention of neurodegenerative disease states and/or behavioural disorders. Such neurodegenerative disease states and/or behavioral disorders include, but are not limited to, Alzheimer's Disease, Parkinson's Disease, Huntington's Disease, Tourette Syndrome, schizophrenia, mania, dementia, paranoia, obsessive compulsive disorder, panic disorder, learning disabilities, ALS, psychoses, autism, and altered behaviors, including disorders in feeding, sleep patterns, balance, and perception. In addition, compositions of the invention may also play a role in the treatment, prevention and/or detection of developmental disorders associated with the developing embryo, or sexually-linked disorders.

[0686] Additionally, polypeptides, polynucleotides and/or agonists or antagonists of the invention, may be useful in protecting neural cells from diseases, damage, disorders, or injury, associated with cerebrovascular disorders including, but not limited to, carotid artery diseases (e.g., carotid artery thrombosis, carotid stenosis, or Moyamoya Disease), cerebral amyloid angiopathy, cerebral aneurysm, cerebral anoxia, cerebral arteriosclerosis, cerebral arterioyenous malformations, cerebral artery diseases, cerebral embolism and thrombosis (e.g., carotid artery thrombosis, sinus thrombosis, or Wallenberg's Syndrome), cerebral hemorrhage (e.g., epidural or subdural hematoma, or subarachnoid hemorrhage), cerebral infarction, cerebral ischemia (e.g., transient cerebral ischemia, Subclavian Steal Syndrome, or vertebrobasilar insufficiency), vascular dementia (e.g., multi-infarct), leukomalacia, periventricular, and vascular headache (e.g., cluster headache or migraines).

[0687] In accordance with yet a further aspect of the present invention, there is provided a process for utilizing polynucleotides or polypeptides, as well as agonists or antagonists of the present invention, for therapeutic purposes, for example, to stimulate neurological cell proliferation and/or differentiation. Therefore, polynucleotides, polypeptides, agonists and/or antagonists of the invention may be used to treat and/or detect neurologic diseases. Moreover, polynucleotides or polypeptides, or agonists or antagonists of the invention, can be used as a marker or detector of a particular nervous system disease or disorder.

[0688] Examples of neurologic diseases which can be treated or detected with polynucleotides, polypeptides, agonists, and/or antagonists of the present invention include brain diseases, such as metabolic brain diseases which includes phenylketonuria such as maternal phenylketonuria, pyruvate carboxylase deficiency, pyruvate dehydrogenase complex deficiency, Wernicke's Encephalopathy, brain edema, brain neoplasms such as cerebellar neoplasms which include infratentorial neoplasms, cerebral ventricle neoplasms such as choroid plexus neoplasms, hypothalamic neoplasms, supratentorial neoplasms, canavan disease, cerebellar diseases such as cerebellar ataxia which include spinocerebellar degeneration such as ataxia telangiectasia, cerebellar dyssynergia, Friederich's Ataxia, Machado-Joseph Disease, olivopontocerebellar atrophy, cerebellar neoplasms such as infratentorial neoplasms, diffuse cerebral sclerosis such as encephalitis periaxialis, globoid cell leukodystrophy, metachromatic leukodystrophy and subacute sclerosing panencephalitis.

[0689] Additional neurologic diseases which can be treated or detected with polynucleotides, polypeptides, agonists, and/or antagonists of the present invention include cerebrovascular disorders (such as carotid artery diseases which include carotid artery thrombosis, carotid stenosis and Moyamoya Disease), cerebral amyloid angiopathy, cerebral aneurysm, cerebral anoxia, cerebral arteriosclerosis, cerebral arterioyenous malformations, cerebral artery diseases, cerebral embolism and thrombosis such as carotid artery thrombosis, sinus thrombosis and Wallenberg's Syndrome, cerebral hemorrhage such as epidural hematoma, subdural hematoma and subarachnoid hemorrhage, cerebral infarction, cerebral ischemia such as transient cerebral ischemia, Subclavian Steal Syndrome and vertebrobasilar insufficiency, vascular dementia such as multi-infarct dementia, periventricular leukomalacia, vascular headache such as cluster headache and migraine.

[0690] Additional neurologic diseases which can be treated or detected with polynucleotides, polypeptides, agonists, and/or antagonists of the present invention include dementia such as AIDS Dementia Complex, presenile dementia such as Alzheimer's Disease and Creutzfeldt-Jakob Syndrome, senile dementia such as Alzheimer's Disease and progressive supranuclear palsy, vascular dementia such as multi-infarct dementia, encephalitis which include encephalitis periaxialis, viral encephalitis such as epidemic encephalitis, Japanese Encephalitis, St. Louis Encephalitis, tick-bome encephalitis and West Nile Fever, acute disseminated encephalomyelitis, meningoencephalitis such as uveomeningoencephalitic syndrome, Postencephalitic Parkinson Disease and subacute sclerosing panencephalitis, encephalomalacia such as periventricular leukomalacia, epilepsy such as generalized epilepsy which includes infantile spasms, absence epilepsy, myoclonic epilepsy which includes MERRF Syndrome, tonic-clonic epilepsy, partial epilepsy such as complex partial epilepsy, frontal lobe epilepsy and temporal lobe epilepsy, post-traumatic epilepsy, status epilepticus such as Epilepsia Partialis Continua, and Hallervorden-Spatz Syndrome.

[0691] Additional neurologic diseases which can be treated or detected with polynucleotides, polypeptides, agonists, and/or antagonists of the present invention include hydrocephalus such as Dandy-Walker Syndrome and normal pressure hydrocephalus, hypothalamic diseases such as hypothalamic neoplasms, cerebral malaria, narcolepsy which includes cataplexy, bulbar poliomyelitis, cerebri pseudotumor, Rett Syndrome, Reye's Syndrome, thalamic diseases, cerebral toxoplasmosis, intracranial tuberculoma and Zellweger Syndrome, central nervous system infections such as AIDS Dementia Complex, Brain Abscess, subdural empyema, encephalomyelitis such as Equine Encephalomyelitis, Venezuelan Equine Encephalomyelitis, Necrotizing Hemorrhagic Encephalomyelitis, Visna, and cerebral malaria.

[0692] Additional neurologic diseases which can be treated or detected with polynucleotides, polypeptides, agonists, and/or antagonists of the present invention include meningitis such as arachnoiditis, aseptic meningtitis such as viral meningtitis which includes lymphocytic choriomeningitis, Bacterial meningtitis which includes Haemophilus Meningtitis, Listeria Meningtitis, Meningococcal Meningtitis such as Waterhouse-Friderichsen Syndrome, Pneumococcal Meningtitis and meningeal tuberculosis, fungal meningitis such as Cryptococcal Meningtitis, subdural effusion, meningoencephalitis such as uvemeningoencephalitic syndrome, myelitis such as transverse myelitis, neurosyphilis such as tabes dorsalis, poliomyelitis which includes bulbar poliomyelitis and postpoliomyelitis syndrome, prion diseases (such as Creutzfeldt-Jakob Syndrome, Bovine Spongiform Encephalopathy, Gerstmann-Straussler Syndrome, Kuru, Scrapie), and cerebral toxoplasmosis.

[0693] Additional neurologic diseases which can be treated or detected with polynucleotides, polypeptides, agonists, and/or antagonists of the present invention include central nervous system neoplasms such as brain neoplasms that include cerebellar neoplasms such as infratentorial neoplasms, cerebral ventricle neoplasms such as choroid plexus neoplasms, hypothalamic neoplasms and supratentorial neoplasms, meningeal neoplasms, spinal cord neoplasms which include epidural neoplasms, demyelinating diseases such as Canavan Diseases, diffuse cerebral sceloris which includes adrenoleukodystrophy, encephalitis periaxialis, globoid cell leukodystrophy, diffuse cerebral sclerosis such as metachromatic leukodystrophy, allergic encephalomyelitis, necrotizing hemorrhagic encephalomyelitis, progressive multifocal leukoencephalopathy, multiple sclerosis, central pontine myelinolysis, transverse myelitis, neuromyelitis optica, Scrapie, Swayback, Chronic Fatigue Syndrome, Visna, High Pressure Nervous Syndrome, Meningism, spinal cord diseases such as amyotonia congenita, amyotrophic lateral sclerosis, spinal muscular atrophy such as Werdnig-Hoffmann Disease, spinal cord compression, spinal cord neoplasms such as epidural neoplasms, syringomyelia, Tabes Dorsalis, Stiff-Man Syndrome, mental retardation such as Angelman Syndrome, Cri-du-Chat Syndrome, De Lange's Syndrome, Down Syndrome, Gangliosidoses such as gangliosidoses G(M1), Sandhoff Disease, Tay-Sachs Disease, Hartnup Disease, homocystinuria, Laurence-Moon-Biedl Syndrome, Lesch-Nyhan Syndrome, Maple Syrup Urine Disease, mucolipidosis such as fucosidosis, neuronal ceroid-lipofuscinosis, oculocerebrorenal syndrome, phenylketonuria such as maternal phenylketonuria, Prader-Willi Syndrome, Rett Syndrome, Rubinstein-Taybi Syndrome, Tuberous Sclerosis, WAGR Syndrome, nervous system abnormalities such as holoprosencephaly, neural tube defects such as anencephaly which includes hydrangencephaly, Arnold-Chairi Deformity, encephalocele, meningocele, meningomyelocele, spinal dysraphism such as spina bifida cystica and spina bifida occulta.

[0694] Additional neurologic diseases which can be treated or detected with polynucleotides, polypeptides, agonists, and/or antagonists of the present invention include hereditary motor and sensory neuropathies which include Charcot-Marie Disease, Hereditary optic atrophy, Refsum's Disease, hereditary spastic paraplegia, Werdnig-Hoffmann Disease, Hereditary Sensory and Autonomic Neuropathies such as Congenital Analgesia and Familial Dysautonomia, Neurologic manifestations (such as agnosia that include Gerstmann's Syndrome, Amnesia such as retrograde amnesia, apraxia, neurogenic bladder, cataplexy, communicative disorders such as hearing disorders that includes deafness, partial hearing loss, loudness recruitment and tinnitus, language disorders such as aphasia which include agraphia, anomia, broca aphasia, and Wernicke Aphasia, Dyslexia such as Acquired Dyslexia, language development disorders, speech disorders such as aphasia which includes anomia, broca aphasia and Wernicke Aphasia, articulation disorders, communicative disorders such as speech disorders which include dysarthria, echolalia, mutism and stuttering, voice disorders such as aphonia and hoarseness, decerebrate state, delirium, fasciculation, hallucinations, meningism, movement disorders such as angelman syndrome, ataxia, athetosis, chorea, dystonia, hypokinesia, muscle hypotonia, myoclonus, tic, torticollis and tremor, muscle hypertonia such as muscle rigidity such as stiff-man syndrome, muscle spasticity, paralysis such as facial paralysis which includes Herpes Zoster Oticus, Gastroparesis, Hemiplegia, ophthalmoplegia such as diplopia, Duane's Syndrome, Horner's Syndrome, Chronic progressive external ophthalmoplegia such as Kearns Syndrome, Bulbar Paralysis, Tropical Spastic Paraparesis, Paraplegia such as Brown-Sequard Syndrome, quadriplegia, respiratory paralysis and vocal cord paralysis, paresis, phantom limb, taste disorders such as ageusia and dysgeusia, vision disorders such as amblyopia, blindness, color vision defects, diplopia, hemianopsia, scotoma and subnormal vision, sleep disorders such as hypersomnia which includes Kleine-Levin Syndrome, insomnia, and somnambulism, spasm such as trismus, unconsciousness such as coma, persistent vegetative state and syncope and vertigo, neuromuscular diseases such as amyotonia congenita, amyotrophic lateral sclerosis, Lambert-Eaton Myasthenic Syndrome, motor neuron disease, muscular atrophy such as spinal muscular atrophy, Charcot-Marie Disease and Werdnig-Hoffmann Disease, Postpoliomyelitis Syndrome, Muscular Dystrophy, Myasthenia Gravis, Myotonia Atrophica, Myotonia Confenita, Nemaline Myopathy, Familial Periodic Paralysis, Multiplex Paramyloclonus, Tropical Spastic Paraparesis and Stiff-Man Syndrome, peripheral nervous system diseases such as acrodynia, amyloid neuropathies, autonomic nervous system diseases such as Adie's Syndrome, Barre-Lieou Syndrome, Familial Dysautonomia, Horner's Syndrome, Reflex Sympathetic Dystrophy and Shy-Drager Syndrome, Cranial Nerve Diseases such as Acoustic Nerve Diseases such as Acoustic Neuroma which includes Neurofibromatosis 2, Facial Nerve Diseases such as Facial Neuralgia,Melkersson-Rosenthal Syndrome, ocular motility disorders which includes amblyopia, nystagmus, oculomotor nerve paralysis, ophthalmoplegia such as Duane's Syndrome, Horner's Syndrome, Chronic Progressive External Ophthalmoplegia which includes Kearns Syndrome, Strabismus such as Esotropia and Exotropia, Oculomotor Nerve Paralysis, Optic Nerve Diseases such as Optic Atrophy which includes Hereditary Optic Atrophy, Optic Disk Drusen, Optic Neuritis such as Neuromyelitis Optica, Papilledema, Trigeminal Neuralgia, Vocal Cord Paralysis, Demyelinating Diseases such as Neuromyelitis Optica and Swayback, and Diabetic neuropathies such as diabetic foot.

[0695] Additional neurologic diseases which can be treated or detected with polynucleotides, polypeptides, agonists, and/or antagonists of the present invention include nerve compression syndromes such as carpal tunnel syndrome, tarsal tunnel syndrome, thoracic outlet syndrome such as cervical rib syndrome, ulnar nerve compression syndrome, neuralgia such as causalgia, cervico-brachial neuralgia, facial neuralgia and trigeminal neuralgia, neuritis such as experimental allergic neuritis, optic neuritis, polyneuritis, polyradiculoneuritis and radiculities such as polyradiculitis, hereditary motor and sensory neuropathies such as Charcot-Marie Disease, Hereditary Optic Atrophy, Refsum's Disease, Hereditary Spastic Paraplegia and Werdnig-Hoffmann Disease, Hereditary Sensory and Autonomic Neuropathies which include Congenital Analgesia and Familial Dysautonomia, POEMS Syndrome, Sciatica, Gustatory Sweating and Tetany).

[0696] Endocrine Disorders

[0697] Polynucleotides or polypeptides, or agonists or antagonists of the present invention, may be used to treat, prevent, diagnose, and/or prognose disorders and/or diseases related to hormone imbalance, and/or disorders or diseases of the endocrine system.

[0698] Hormones secreted by the glands of the endocrine system control physical growth, sexual function, metabolism, and other functions. Disorders may be classified in two ways: disturbances in the production of hormones, and the inability of tissues to respond to hormones. The etiology of these hormone imbalance or endocrine system diseases, disorders or conditions may be genetic, somatic, such as cancer and some autoimmune diseases, acquired (e.g., by chemotherapy, injury or toxins), or infectious. Moreover, polynucleotides, polypeptides, antibodies, and/or agonists or antagonists of the present invention can be used as a marker or detector of a particular disease or disorder related to the endocrine system and/or hormone imbalance.

[0699] Endocrine system and/or hormone imbalance and/or diseases encompass disorders of uterine motility including, but not limited to: complications with pregnancy and labor (e.g., pre-term labor, post-term pregnancy, spontaneous abortion, and slow or stopped labor); and disorders and/or diseases of the menstrual cycle (e.g., dysmenorrhea and endometriosis).

[0700] Endocrine system and/or hormone imbalance disorders and/or diseases include disorders and/or diseases of the pancreas, such as, for example, diabetes mellitus, diabetes insipidus, congenital pancreatic agenesis, pheochromocytoma—islet cell tumor syndrome; disorders and/or diseases of the adrenal glands such as, for example, Addison's Disease, corticosteroid deficiency, virilizing disease, hirsutism, Cushing 's Syndrome, hyperaldosteronism, pheochromocytoma; disorders and/or diseases of the pituitary gland, such as, for example, hyperpituitarism, hypopituitarism, pituitary dwarfism, pituitary adenoma, panhypopituitarism, acromegaly, gigantism; disorders and/or diseases of the thyroid, including but not limited to, hyperthyroidism, hypothyroidism, Plummer's disease, Graves' disease (toxic diffuse goiter), toxic nodular goiter, thyroiditis (Hashimoto's thyroiditis, subacute granulomatous thyroiditis, and silent lymphocytic thyroiditis), Pendred's syndrome, myxedema, cretinism, thyrotoxicosis, thyroid hormone coupling defect, thymic aplasia, Hurthle cell tumours of the thyroid, thyroid cancer, thyroid carcinoma, Medullary thyroid carcinoma; disorders and/or diseases of the parathyroid, such as, for example, hyperparathyroidism, hypoparathyroidism; disorders and/or diseases of the hypothalamus.

[0701] In addition, endocrine system and/or hormone imbalance disorders and/or diseases may also include disorders and/or diseases of the testes or ovaries, including cancer. Other disorders and/or diseases of the testes or ovaries further include, for example, ovarian cancer, polycystic ovary syndrome, Klinefelter's syndrome, vanishing testes syndrome (bilateral anorchia), congenital absence of Leydig's cells, cryptorchidism, Noonan's syndrome, myotonic dystrophy, capillary haemangioma of the testis (benign), neoplasias of the testis and neo-testis.

[0702] Moreover, endocrine system and/or hormone imbalance disorders and/or diseases may also include disorders and/or diseases such as, for example, polyglandular deficiency syndromes, pheochromocytoma, neuroblastoma, multiple Endocrine neoplasia, and disorders and/or cancers of endocrine tissues.

[0703] In another embodiment, a polypeptide of the invention, or polynucleotides, antibodies, agonists, or antagonists corresponding to that polypeptide, may be used to diagnose, prognose, prevent, and/or treat endocrine diseases and/or disorders associated with the tissue(s) in which the polypeptide of the invention is expressed, including one, two, three, four, five, or more tissues disclosed in Table 1A, column 8 (Tissue Distribution Library Code).

[0704] Reproductive System Disorders

[0705] The polynucleotides or polypeptides, or agonists or antagonists of the invention may be used for the diagnosis, treatment, or prevention of diseases and/or disorders of the reproductive system. Reproductive system disorders that can be treated by the compositions of the invention, include, but are not limited to, reproductive system injuries, infections, neoplastic disorders, congenital defects, and diseases or disorders which result in infertility, complications with pregnancy, labor, or parturition, and postpartum difficulties.

[0706] Reproductive system disorders and/or diseases include diseases and/or disorders of the testes, including testicular atrophy, testicular feminization, cryptorchism (unilateral and bilateral), anorchia, ectopic testis, epididymitis and orchitis (typically resulting from infections such as, for example, gonorrhea, mumps, tuberculosis, and syphilis), testicular torsion, vasitis nodosa, germ cell tumors (e.g., seminomas, embryonal cell carcinomas, teratocarcinomas, choriocarcinomas, yolk sac tumors, and teratomas), stromal tumors (e.g., Leydig cell tumors), hydrocele, hematocele, varicocele, spermatocele, inguinal hernia, and disorders of sperm production (e.g., immotile cilia syndrome, aspermia, asthenozoospermia, azoospermia, oligospermia, and teratozoospermia).

[0707] Reproductive system disorders also include disorders of the prostate gland, such as acute non-bacterial prostatitis, chronic non-bacterial prostatitis, acute bacterial prostatitis, chronic bacterial prostatitis, prostatodystonia, prostatosis, granulomatous prostatitis, malacoplakia, benign prostatic hypertrophy or hyperplasia, and prostate neoplastic disorders, including adenocarcinomas, transitional cell carcinomas, ductal carcinomas, and squamous cell carcinomas.

[0708] Additionally, the compositions of the invention may be useful in the diagnosis, treatment, and/or prevention of disorders or diseases of the penis and urethra, including inflammatory disorders, such as balanoposthitis, balanitis xerotica obliterans, phimosis, paraphimosis, syphilis, herpes simplex virus, gonorrhea, non-gonococcal urethritis, chlamydia, mycoplasma, trichomonas, HIV, AIDS, Reiter's syndrome, condyloma acuminatum, condyloma latum, and pearly penile papules; urethral abnormalities, such as hypospadias, epispadias, and phimosis; premalignant lesions, including Erythroplasia of Queyrat, Bowen's disease, Bowenoid paplosis, giant condyloma of Buscke-Lowenstein, and varrucous carcinoma; penile cancers, including squamous cell carcinomas, carcinoma in situ, verrucous carcinoma, and disseminated penile carcinoma; urethral neoplastic disorders, including penile urethral carcinoma, bulbomembranous urethral carcinoma, and prostatic urethral carcinoma; and erectile disorders, such as priapism, Peyronie's disease, erectile dysfunction, and impotence.

[0709] Moreover, diseases and/or disorders of the vas deferens include vasculititis and CBAVD (congenital bilateral absence of the vas deferens); additionally, the polynucleotides, polypeptides, and agonists or antagonists of,the present invention may be used in the diagnosis, treatment, and/or prevention of diseases and/or disorders of the seminal vesicles, including hydatid disease, congenital chloride diarrhea, and polycystic kidney disease.

[0710] Other disorders and/or diseases of the male reproductive system include, for example, Klinefelter's syndrome, Young's syndrome, premature ejaculation, diabetes mellitus, cystic fibrosis, Kartagener's syndrome, high fever, multiple sclerosis, and gynecomastia.

[0711] Further, the polynucleotides, polypeptides, and agonists or antagonists of the present invention may be used in the diagnosis, treatment, and/or prevention of diseases and/or disorders of the vagina and vulva, including bacterial vaginosis, candida vaginitis, herpes simplex virus, chancroid, granuloma inguinale, lymphogranuloma venereum, scabies, human papillomavirus, vaginal trauma, vulvar trauma, adenosis, chlamydia vaginitis, gonorrhea, trichomonas vaginitis, condyloma acuminatum, syphilis, molluscum contagiosum, atrophic vaginitis, Paget's disease, lichen sclerosus, lichen planus, vulvodynia, toxic shock syndrome, vaginismus, vulvovaginitis, vulvar vestibulitis, and neoplastic disorders, such as squamous cell hyperplasia, clear cell carcinoma, basal cell carcinoma, melanomas, cancer of Bartholin's gland, and vulvar intraepithelial neoplasia.

[0712] Disorders and/or diseases of the uterus include dysmenorrhea, retroverted uterus, endometriosis, fibroids, adenomyosis, anovulatory bleeding, amenorrhea, Cushing's syndrome, hydatidiform moles, Asherman's syndrome, premature menopause, precocious puberty, uterine polyps, dysfunctional uterine bleeding (e.g., due to aberrant hormonal signals), and neoplastic disorders, such as adenocarcinomas, keiomyosarcomas, and sarcomas. Additionally, the polypeptides, polynucleotides, or agonists or antagonists of the invention may be useful as a marker or detector of, as well as in the diagnosis, treatment, and/or prevention of congenital uterine abnormalities, such as bicornuate uterus, septate uterus, simple unicornuate uterus, unicornuate uterus with a noncavitary rudimentary horn, unicornuate uterus with a non-communicating cavitary rudimentary horn, unicornuate uterus with a communicating cavitary horn, arcuate uterus, uterine didelfus, and T-shaped uterus.

[0713] Ovarian diseases and/or disorders include anovulation, polycystic ovary syndrome (Stein-Leventhal syndrome), ovarian cysts, ovarian hypofunction, ovarian insensitivity to gonadotropins, ovarian overproduction of androgens, right ovarian vein syndrome, amenorrhea, hirutism, and ovarian cancer (including, but not limited to, primary and secondary cancerous growth, Sertoli-Leydig tumors, endometriod carcinoma of the ovary, ovarian papillary serous adenocarcinoma, ovarian mucinous adenocarcinoma, and Ovarian Krukenberg tumors).

[0714] Cervical diseases and/or disorders include cervicitis, chronic cervicitis, mucopurulent cervicitis, cervical dysplasia, cervical polyps, Nabothian cysts, cervical erosion, cervical incompetence, and cervical neoplasms (including, for example, cervical carcinoma, squamous metaplasia, squamous cell carcinoma, adenosquamous cell neoplasia, and columnar cell neoplasia).

[0715] Additionally, diseases and/or disorders of the reproductive system include disorders and/or diseases of pregnancy, including miscarriage and stillbirth, such as early abortion, late abortion, spontaneous abortion, induced abortion, therapeutic abortion, threatened abortion, missed abortion, incomplete abortion, complete abortion, habitual abortion, missed abortion, and septic abortion; ectopic pregnancy, anemia, Rh incompatibility, vaginal bleeding during pregnancy, gestational diabetes, intrauterine growth retardation, polyhydramnios, HELLP syndrome, abruptio placentae, placenta previa, hyperemesis, preeclarnpsia, eclampsia, herpes gestationis, and urticaria of pregnancy. Additionally, the polynucleotides, polypeptides, and agonists or antagonists of the present invention may be used in the diagnosis, treatment, and/or prevention of diseases that can complicate pregnancy, including heart disease, heart failure, rheumatic heart disease, congenital heart disease, mitral valve prolapse, high blood pressure, anemia, kidney disease, infectious disease (e.g., rubella, cytomegalovirus, toxoplasmosis, infectious hepatitis, chlamydia, HIV, AIDS, and genital herpes), diabetes mellitus, Graves' disease, thyroiditis, hypothyroidism, Hashimoto's thyroiditis, chronic active hepatitis, cirrhosis of the liver, primary biliary cirrhosis, asthma, systemic lupus eryematosis, rheumatoid arthritis, myasthenia gravis, idiopathic thrombocytopenic purpura, appendicitis, ovarian cysts, gallbladder disorders, and obstruction of the intestine.

[0716] Complications associated with labor and parturition include premature rupture of the membranes, pre-term labor, post-term pregnancy, postmaturity, labor that progresses too slowly, fetal distress (e.g., abnormal heart rate (fetal or maternal), breathing problems, and abnormal fetal position), shoulder dystocia, prolapsed umbilical cord, amniotic fluid embolism, and aberrant uterine bleeding.

[0717] Further, diseases and/or disorders of the postdelivery period, including endometritis, myometritis, parametritis, peritonitis, pelvic thrombophlebitis, pulmonary embolism, endotoxemia, pyelonephritis, saphenous thrombophlebitis, mastitis, cystitis, postpartum hemorrhage, and inverted uterus.

[0718] Other disorders and/or diseases of the female reproductive system that may be diagnosed, treated, and/or prevented by the polynucleotides, polypeptides, and agonists or antagonists of the present invention include, for example, Turner's syndrome, pseudohermaphroditism, premenstrual syndrome, pelvic inflammatory disease, pelvic congestion (vascular engorgement), frigidity, anorgasmia, dyspareunia, ruptured fallopian tube, and Mittelschmerz.

[0719] Infectious Disease

[0720] Polynucleotides or polypeptides, as well as agonists or antagonists of the present invention can be used to treat or detect infectious agents. For example, by increasing the immune response, particularly increasing the proliferation and differentiation of B and/or T cells, infectious diseases may be treated. The immune response may be increased by either enhancing an existing immune response, or by initiating a new immune response. Alternatively, polynucleotides or polypeptides, as well as agonists or antagonists of the present invention may also directly inhibit the infectious agent, without necessarily eliciting an immune response.

[0721] Viruses are one example of an infectious agent that can cause disease or symptoms that can be treated or detected by a polynucleotide or polypeptide and/or agonist or antagonist of the present invention. Examples of viruses, include, but are not limited to Examples of viruses, include, but are not limited to the following DNA and RNA viruses and viral families: Arbovirus, Adenoviridae, Arenaviridae, Arterivirus, Birnaviridae, Bunyaviridae, Caliciviridae, Circoviridae, Coronaviridae, Dengue, EBV, HIV, Flaviviridae, Hepadnaviridae (Hepatitis), Herpesviridae (such as, Cytomegalovirus, Herpes Simplex, Herpes Zoster), Mononegavirus (e.g., Paramyxoviridae, Morbillivirus, Rhabdoviridae), Orthomyxoviridae (e.g., Influenza A, Influenza B, and parainfluenza), Papiloma virus, Papovaviridae, Parvoviridae, Picomaviridae, Poxyiridae (such as Smallpox or Vaccinia), Reoviridae (e.g., Rotavirus), Retroviridae (HTLV-I, HTLV-II, Lentivirus), and Togaviridae (e.g., Rubivirus). Viruses falling within these families can cause a variety of diseases or symptoms, including, but not limited to: arthritis, bronchiollitis, respiratory syncytial virus, encephalitis, eye infections (e.g., conjunctivitis, keratitis), chronic fatigue syndrome, hepatitis (A, B, C, E, Chronic Active, Delta), Japanese B encephalitis, Junin, Chikungunya, Rift Valley fever, yellow fever, meningitis, opportunistic infections (e.g., AIDS), pneumonia, Burkitt's Lymphoma, chickenpox, hemorrhagic fever, Measles, Mumps, Parainfluenza, Rabies, the common cold, Polio, leukemia, Rubella, sexually transmitted diseases, skin diseases (e.g., Kaposi's, warts), and viremia. polynucleotides or polypeptides, or agonists or antagonists of the invention, can be used to treat or detect any of these symptoms or diseases. In specific embodiments, polynucleotides, polypeptides, or agonists or antagonists of the invention are used to treat: meningitis, Dengue, EBV, and/or hepatitis (e.g., hepatitis B). In an additional specific embodiment polynucleotides, polypeptides, or agonists or antagonists of the invention are used to treat patients nonresponsive to one or more other commercially available hepatitis vaccines. In a further specific embodiment polynucleotides, polypeptides, or agonists or antagonists of the invention are used to treat AIDS.

[0722] Similarly, bacterial and fungal agents that can cause disease or symptoms and that can be treated or detected by a polynucleotide or polypeptide and/or agonist or antagonist of the present invention include, but not limited to, the following Gram-Negative and Gram-positive bacteria, bacterial families, and fungi: Actinomyces (e.g., Norcardia), Acinetobacter, Cryptococcus neoformans, Aspergillus, Bacillaceae (e.g., Bacillus anthrasis), Bacteroides (e.g., Bacteroides fragilis), Blastomycosis, Bordetella, Borrelia (e.g., Borrelia burgdorferi), Brucella, Candidia, Campylobacter, Chlamydia, Clostridium (e.g., Clostridium botulinum, Clostridium dificile, Clostridium perfringens, Clostridium tetani), Coccidioides, Corynebacterium (e.g., Corynebacterium diptheriae), Cryptococcus, Dermatocycoses, E. coli (e.g., Enterotoxigenic E. coli and Enterohemorrhagic E. coli), Enterobacter (e.g. Enterobacter aerogenes), Enterobacteriaceae (Klebsiella, Salmonella (e.g., Salmonella typhi, Salmonella enteritidis, Salmonella typhi), Serratia, Yersinia, Shigella), Erysipelothrix, Haemophilus (e.g., Haemophilus influenza type B), Helicobacter, Legionella (e.g., Legionella pneumophila), Leptospira, Listeria (e.g., Listeria monocytogenes), Mycoplasma, Mycobacterium (e.g., Mycobacterium leprae and Mycohacterium tuberculosis), Vibrio (e.g., Vibrio cholerae), Neisseriaceae (e.g., Neisseria gonorrhea, Neisseria meningitidis), Pasteurellacea, Proteus, Pseudomonas (e.g., Pseudomonas aeruginosa), Rickettsiaceae, Spirochetes (e.g., Treponema spp., Leptospira spp., Borrelia spp.), Shigella spp., Staphylococcus (e.g., Staphylococcus aureus), Menngiococcus, Pneumococcus and Streptococcus (e.g., Streptococcus pneumoniae and Groups A, B, and C Streptococci), and Ureaplasmas. These bacterial, parasitic, and fungal families can cause diseases or symptoms, including, but not limited to: antibiotic-resistant infections, bacteremia, endocarditis, septicemia, eye infections (e.g., conjunctivitis), uveitis, tuberculosis, gingivitis, bacterial diarrhea, opportunistic infections (e.g., AIDS related infections), paronychia, prosthesis-related infections, dental caries, Reiter's Disease, respiratory tract infections, such as Whooping Cough or Empyema, sepsis, Lyme Disease, Cat-Scratch Disease, dysentery, paratyphoid fever, food poisoning, Legionella disease, chronic and acute inflammation, erythema, yeast infections, typhoid, pneumonia, gonorrhea, meningitis (e.g., mengitis types A and B), chlamydia, syphillis, diphtheria, leprosy, brucellosis, peptic ulcers, anthrax, spontaneous abortions, birth defects, pneumonia, lung infections, ear infections, deafness, blindness, lethargy, malaise, vomiting, chronic diarrhea, Crohn's disease, colitis, vaginosis, sterility, pelvic inflammatory diseases, candidiasis, paratuberculosis, tuberculosis, lupus, botulism, gangrene, tetanus, impetigo, Rheumatic Fever, Scarlet Fever, sexually transmitted diseases, skin diseases (e.g., cellulitis, dermatocycoses), toxemia, urinary tract infections, wound infections, noscomial infections. Polynucleotides or polypeptides, agonists or antagonists of the invention, can be used to treat or detect any of these symptoms or diseases. In specific embodiments, polynucleotides, polypeptides, agonists or antagonists of the invention are used to treat: tetanus, diptheria, botulism, and/or meningitis type B.

[0723] Moreover, parasitic agents causing disease or symptoms that can be treated, prevented, and/or diagnosed by a polynucleotide or polypeptide and/or agonist or antagonist of the present invention include, but not limited to, the following families or class: Amebiasis, Babesiosis, Coccidiosis, Cryptosporidiosis, Dientamoebiasis, Dourine, Ectoparasitic, Giardias, Helminthiasis, Leishmaniasis, Schistisoma, Theileriasis, Toxoplasmosis, Trypanosomiasis, and Trichomonas and Sporozoans (e.g., Plasmodium virax, Plasmodium falciparium, Plasmodium malariae and Plasmodium ovale). These parasites can cause a variety of diseases or symptoms, including, but not limited to: Scabies, Trombiculiasis, eye infections, intestinal disease (e.g., dysentery, giardiasis), liver disease, lung disease, opportunistic infections (e.g., AIDS related), malaria, pregnancy complications, and toxoplasmosis. polynucleotides or polypeptides, or agonists or antagonists of the invention, can be used to treat, prevent, and/or diagnose any of these symptoms or diseases. In specific embodiments, polynucleotides, polypeptides, or agonists or antagonists of the invention are used to treat, prevent, and/or diagnose malaria.

[0724] Polynucleotides or polypeptides, as well as agonists or antagonists of the present invention of the present invention could either be by administering an effective amount of a polypeptide to the patient, or by removing cells from the patient, supplying the cells with a polynucleotide of the present invention, and returning the engineered cells to the patient (ex vivo therapy). Moreover, the polypeptide or polynucleotide of the present invention can be used as an antigen in a vaccine to raise an immune response against infectious disease.

[0725] Regeneration

[0726] Polynucleotides or polypeptides, as well as agonists or antagonists of the present invention can be used to differentiate, proliferate, and attract cells, leading to the regeneration of tissues. (See, Science 276:59-87 (1997)). The regeneration of tissues could be used to repair, replace, or protect tissue damaged by congenital defects, trauma (wounds, bums, incisions, or ulcers), age, disease (e.g. osteoporosis, osteocarthritis, periodontal disease, liver failure), surgery, including cosmetic plastic surgery, fibrosis, reperfusion injury, or systemic cytokine damage.

[0727] Tissues that could be regenerated using the present invention include organs (e.g., pancreas, liver, intestine, kidney, skin, endothelium), muscle (smooth, skeletal or cardiac), vasculature (including vascular and lymphatics), nervous, hematopoietic, and skeletal (bone, cartilage, tendon, and ligament) tissue. Preferably, regeneration occurs without or decreased scarring. Regeneration also may include angiogenesis.

[0728] Moreover, polynucleotides or polypeptides, as well as agonists or antagonists of the present invention, may increase regeneration of tissues difficult to heal. For example, increased tendon/ligament regeneration would quicken recovery time after damage. Polynucleotides or polypeptides, as well as agonists or antagonists of the present invention could also be used prophylactically in an effort to avoid damage. Specific diseases that could be treated include of tendinitis, carpal tunnel syndrome, and other tendon or ligament defects. A further example of tissue regeneration of non-healing wounds includes pressure ulcers, ulcers associated with vascular insufficiency, surgical, and traumatic wounds.

[0729] Similarly, nerve and brain tissue could also be regenerated by using polynucleotides or polypeptides, as well as agonists or antagonists of the present invention, to proliferate and differentiate nerve cells. Diseases that could be treated using this method include central and peripheral nervous system diseases, neuropathies, or mechanical and traumatic disorders (e.g., spinal cord disorders, head trauma, cerebrovascular disease, and stoke). Specifically, diseases associated with peripheral nerve injuries, peripheral neuropathy (e.g., resulting from chemotherapy or other medical therapies), localized neuropathies, and central nervous system diseases (e.g., Alzheimer's disease, Parkinson's disease, Huntington's disease, amyotrophic lateral sclerosis, and Shy-Drager syndrome), could all be treated using the polynucleotides or polypeptides, as well as agonists or antagonists of the present invention.

[0730] Gastrointestinal Disorders

[0731] Polynucleotides or polypeptides, or agonists or antagonists of the present invention, may be used to treat, prevent, diagnose, and/or prognose gastrointestinal disorders, including inflammatory diseases and/or conditions, infections, cancers (e.g., intestinal neoplasms (carcinoid tumor of the small intestine, non-Hodgkin's lymphoma of the small intestine, small bowl lymphoma)), and ulcers, such as peptic ulcers.

[0732] Gastrointestinal disorders include dysphagia, odynophagia, inflammation of the esophagus, peptic esophagitis, gastric reflux, submucosal fibrosis and stricturing, Mallory-Weiss lesions, leiomyomas, lipomas, epidermal cancers, adeoncarcinomas, gastric retention disorders, gastroenteritis, gastric atrophy, gastric/stomach cancers, polyps of the stomach, autoimmune disorders such as pernicious anemia, pyloric stenosis, gastritis (bacterial, viral, eosinophilic, stress-induced, chronic erosive, atrophic, plasma cell, and Menetrier's), and peritoneal diseases (e.g., chyloperioneum, hemoperitoneum, mesenteric cyst, mesenteric lymphadenitis, mesenteric vascular occlusion, panniculitis, neoplasms, peritonitis, pneumoperitoneum, bubphrenic abscess,).

[0733] Gastrointestinal disorders also include disorders associated with the small intestine, such as malabsorption syndromes, distension, irritable bowel syndrome, sugar intolerance, celiac disease, duodenal ulcers, duodenitis, tropical sprue, Whipple's disease, intestinal lymphangiectasia, Crohn's disease, appendicitis, obstructions of the ileum, Meckel's diverticulum, multiple diverticula, failure of complete rotation of the small and large intestine, lymphoma, and bacterial and parasitic diseases (such as Traveler's diarrhea, typhoid and paratyphoid, cholera, infection by Roundworms (Ascariasis lumbricoides), Hookworms (Ancylostoma duodenale), Threadworms (Enterobius vermicularis), Tapeworms (Taenia saginata, Echinococcus granulosus, Diphyllobothrium spp., and T. solium).

[0734] Liver diseases and/or disorders include intrahepatic cholestasis (alagille syndrome, biliary liver cirrhosis), fatty liver (alcoholic fatty liver, reye syndrome), hepatic vein thrombosis, hepatolentricular degeneration, hepatomegaly, hepatopulmonary syndrome, hepatorenal syndrome, portal hypertension (esophageal and gastric varices), liver abscess (amebic liver abscess), liver cirrhosis (alcoholic, biliary and experimental), alcoholic liver diseases (fatty liver, hepatitis, cirrhosis), parasitic (hepatic echinococcosis, fascioliasis, amebic liver abscess), jaundice (hemolytic, hepatocellular, and cholestatic), cholestasis, portal hypertension, liver enlargement, ascites, hepatitis (alcoholic hepatitis, animal hepatitis, chronic hepatitis (autoimmune, hepatitis B, hepatitis C, hepatitis D, drug induced), toxic hepatitis, viral human hepatitis (hepatitis A, hepatitis B, hepatitis C, hepatitis D, hepatitis E), Wilson's disease, granulomatous hepatitis, secondary biliary cirrhosis, hepatic encephalopathy, portal hypertension, varices, hepatic encephalopathy, primary biliary cirrhosis, primary sclerosing cholangitis, hepatocellular adenoma, hemangiomas, bile stones, liver failure (hepatic encephalopathy, acute liver failure), and liver neoplasms (angiomyolipoma, calcified liver metastases, cystic liver metastases, epithelial tumors, fibrolamellar hepatocarcinoma, focal nodular hyperplasia, hepatic adenoma, hepatobiliary cystadenoma, hepatoblastoma, hepatocellular carcinoma, hepatoma, liver cancer, liver hemangioendothelioma, mesenchymal hamartoma, mesenchymal tumors of liver, nodular regenerative hyperplasia, benign liver tumors (Hepatic cysts [Simple cysts, Polycystic liver disease, Hepatobiliary cystadenoma, Choledochal cyst], Mesenchymal tumors [Mesenchymal hamartoma, Infantile hemangioendothelioma, Hemangioma, Peliosis hepatis, Lipomas, Inflammatory pseudotumor, Miscellaneous], Epithelial tumors [Bile duct epithelium (Bile duct hamartoma, Bile duct adenoma), Hepatocyte (Adenoma, Focal nodular hyperplasia, Nodular regenerative hyperplasia)], malignant liver tumors [hepatocellular, hepatoblastoma, hepatocellular carcinoma, cholangiocellular, cholangiocarcinoma, cystadenocarcinoma, tumors of blood vessels, angiosarcoma, Karposi's sarcoma, hemangioendothelioma, other tumors, embryonal sarcoma, fibrosarcoma, leiomyosarcoma, rhabdomyosarcoma, carcinosarcoma, teratoma, carcinoid, squamous carcinoma, primary lymphoma]), peliosis hepatis, erythrohepatic porphyria, hepatic porphyria (acute intermittent porphyria, porphyria cutanea tarda), Zellweger syndrome).

[0735] Pancreatic diseases and/or disorders include acute pancreatitis, chronic pancreatitis (acute necrotizing pancreatitis, alcoholic pancreatitis), neoplasms (adenocarcinoma of the pancreas, cystadenocarcinoma, insulinoma, gastrinoma, and glucagonoma, cystic neoplasms, islet-cell tumors, pancreoblastoma), and other pancreatic diseases (e.g., cystic fibrosis, cyst (pancreatic pseudocyst, pancreatic fistula, insufficiency)).

[0736] Gallbladder diseases include gallstones-(cholelithiasis and choledocholithiasis), postcholecystectomy syndrome, diverticulosis of the gallbladder, acute cholecystitis, chronic cholecystitis, bile duct tumors, and mucocele.

[0737] Diseases and/or disorders of the large intestine include antibiotic-associated colitis, diverticulitis, ulcerative colitis, acquired megacolon, abscesses, fungal and bacterial infections, anorectal disorders (e.g., fissures, hemorrhoids), colonic diseases (colitis, colonic neoplasms [colon cancer, adenomatous colon polyps (e.g., villous adenoma), colon carcinoma, colorectal cancer], colonic diverticulitis, colonic diverticulosis, megacolon [Hirschsprung disease, toxic megacolon]; sigmoid diseases [proctocolitis, sigmoin neoplasms]), constipation, Crohn's disease, diarrhea (infantile diarrhea, dysentery), duodenal diseases (duodenal neoplasms, duodenal obstruction, duodenal ulcer, duodenitis), enteritis (enterocolitis), HIV enteropathy, ileal diseases (ileal neoplasms, ileitis), immunoproliferative small intestinal disease, inflammatory bowel disease (ulcerative colitis, Crohn's disease), intestinal atresia, parasitic diseases (anisakiasis, balantidiasis, blastocystis infections, cryptosporidiosis, dientamoebiasis, amebic dysentery, giardiasis), intestinal fistula (rectal fistula), intestinal neoplasms (cecal neoplasms, colonic neoplasms, duodenal neoplasms, ileal neoplasms, intestinal polyps, jejunal neoplasms, rectal neoplasms), intestinal obstruction (afferent loop syndrome, duodenal obstruction, impacted feces, intestinal pseudo-obstruction [cecal volvulus], intussusception), intestinal perforation, intestinal polyps (colonic polyps, gardner syndrome, peutz-jeghers syndrome), jejunal diseases (jejunal neoplasms), malabsorption syndromes (blind loop syndrome, celiac disease, lactose intolerance, short bowl syndrome, tropical sprue, whipple's disease), mesenteric vascular occlusion, pneumatosis cystoides intestinalis, protein-losing enteropathies (intestinal lymphagiectasis), rectal diseases (anus diseases, fecal incontinence, hemorrhoids, proctitis, rectal fistula, rectal prolapse, rectocele), peptic ulcer (duodenal ulcer, peptic esophagitis, hemorrhage, perforation, stomach ulcer, Zollinger-Ellison syndrome), postgastrectomy syndromes (dumping syndrome), stomach diseases (e.g., achlorhydria, duodenogastric reflux (bile reflux), gastric antral vascular ectasia, gastric fistula, gastric outlet obstruction, gastritis (atrophic or hypertrophic), gastroparesis, stomach dilatation, stomach diverticulum, stomach neoplasms (gastric cancer, gastric polyps, gastric adenocarcinoma, hyperplastic gastric polyp), stomach rupture, stomach ulcer, stomach volvulus), tuberculosis, visceroptosis, vomiting (e.g., hematemesis, hyperemesis gravidarum, postoperative nausea and vomiting) and hemorrhagic colitis.

[0738] Further diseases and/or disorders of the gastrointestinal system include biliary tract diseases, such as, gastroschisis, fistula (e.g., biliary fistula, esophageal fistula, gastric fistula, intestinal fistula, pancreatic fistula), neoplasms (e.g., biliary tract neoplasms, esophageal neoplasms, such as adenocarcinoma of the esophagus, esophageal squamous cell carcinoma, gastrointestinal neoplasms, pancreatic neoplasms, such as adenocarcinoma of the pancreas, mucinous cystic neoplasm of the pancreas, pancreatic cystic neoplasms, pancreatoblastoma, and peritoneal neoplasms), esophageal disease (e.g., bullous diseases, candidiasis, glycogenic acanthosis, ulceration, barrett esophagus varices, atresia, cyst, diverticulum (e.g., Zenker's diverticulum), fistula (e.g., tracheoesophageal fistula), motility disorders (e.g., CREST syndrome, deglutition disorders, achalasia, spasm, gastroesophageal reflux), neoplasms, perforation (e.g., Boerhaave syndrome, Mallory-Weiss syndrome), stenosis, esophagitis, diaphragmatic hernia (e.g., hiatal hernia); gastrointestinal diseases, such as, gastroenteritis (e.g., cholera morbus, norwalk virus infection), hemorrhage (e.g., hematemesis, melena, peptic ulcer hemorrhage), stomach neoplasms (gastric cancer, gastric polyps, gastric adenocarcinoma, stomach cancer)), hernia (e.g., congenital diaphragmatic hernia, femoral hernia, inguinal hernia, obturator hernia, umbilical hernia, ventral hernia), and intestinal diseases (e.g., cecal diseases (appendicitis, cecal neoplasms)).

[0739] Chemotaxis

[0740] Polynucleotides or polypeptides, as well as agonists or antagonists of the present invention may have chemotaxis activity. A chemotaxic molecule attracts or mobilizes cells (e.g., monocytes, fibroblasts, neutrophils, T-cells, mast cells, eosinophils, epithelial and/or endothelial cells) to a particular site in the body, such as inflammation, infection, or site of hyperproliferation. The mobilized cells can then fight off and/or heal the particular trauma or abnormality.

[0741] Polynucleotides or polypeptides, as well as agonists or antagonists of the present invention may increase chemotaxic activity of particular cells. These chemotactic molecules can then be used to treat inflammation, infection, hyperproliferative disorders, or any immune system disorder by increasing the number of cells targeted to a particular location in the body. For example, chemotaxic molecules can be used to treat wounds and other trauma to tissues by attracting immune cells to the injured location. Chemotactic molecules of the present invention can also attract fibroblasts, which can be used to treat wounds.

[0742] It is also contemplated that polynucleotides or polypeptides, as well as agonists or antagonists of the present invention may inhibit chemotactic activity. These molecules could also be used to treat disorders. Thus, polynucleotides or polypeptides, as well as agonists or antagonists of the present invention could be used as an inhibitor of chemotaxis.

[0743] Binding Activity

[0744] A polypeptide of the present invention may be used to screen for molecules that bind to the polypeptide or for molecules to which the polypeptide binds. The binding of the polypeptide and the molecule may activate (agonist), increase, inhibit (antagonist), or decrease activity of the polypeptide or the molecule bound. Examples of such molecules include antibodies, oligonucleotides, proteins (e.g., receptors), or small molecules.

[0745] Preferably, the molecule is closely related to the natural ligand of the polypeptide, e.g., a fragment of the ligand, or a natural substrate, a ligand, a structural or functional mimetic. (See, Coligan et al., Current Protocols in Immunology 1(2):Chapter 5 (1991)). Similarly, the molecule can be closely related to the natural receptor to which the polypeptide binds, or at least, a fragment of the receptor capable of being bound by the polypeptide (e.g., active site). In either case, the molecule can be rationally designed using known techniques.

[0746] Preferably, the screening for these molecules involves producing appropriate cells which express the polypeptide. Preferred cells include cells from mammals, yeast, Drosophila, or E. coli. Cells expressing the polypeptide (or cell membrane containing the expressed polypeptide) are then preferably contacted with a test compound potentially containing the molecule to observe binding, stimulation, or inhibition of activity of either the polypeptide or the molecule.

[0747] The assay may simply test binding of a candidate compound to the polypeptide, wherein binding is detected by a label, or in an assay involving competition with a labeled competitor. Further, the assay may test whether the candidate compound results in a signal generated by binding to the polypeptide.

[0748] Alternatively, the assay can be carried out using cell-free preparations, polypeptide/molecule affixed to a solid support, chemical libraries, or natural product mixtures. The assay may also simply comprise the steps of mixing a candidate compound with a solution containing a polypeptide, measuring polypeptide/molecule activity or binding, and comparing the polypeptide/molecule activity or binding to a standard.

[0749] Preferably, an ELISA assay can measure polypeptide level or activity in a sample (e.g., biological sample) using a monoclonal or polyclonal antibody. The antibody can measure polypeptide level or activity by either binding, directly or indirectly, to the polypeptide or by competing with the polypeptide for a substrate.

[0750] Additionally, the receptor to which the polypeptide of the present invention binds can be identified by numerous methods known to those of skill in the art, for example, ligand panning and FACS sorting (Coligan, et al., Current Protocols in Immun., 1(2), Chapter 5, (1991)). For example, expression cloning is employed wherein polyadenylated RNA is prepared from a cell responsive to the polypeptides, for example, NIH3T3 cells which are known to contain multiple receptors for the FGF family proteins, and SC-3 cells, and a cDNA library created from this RNA is divided into pools and used to transfect COS cells or other cells that are not responsive to the polypeptides. Transfected cells which are grown on glass slides are exposed to the polypeptide of the present invention, after they have been labeled. The polypeptides can be labeled by a variety of means including iodination or inclusion of a recognition site for a site-specific protein kinase.

[0751] Following fixation and incubation, the slides are subjected to auto-radiographic analysis. Positive pools are identified and sub-pools are prepared and re-transfected using an iterative sub-pooling and re-screening process, eventually yielding a single clones that encodes the putative receptor.

[0752] As an alternative approach for receptor identification, the labeled polypeptides can be photoaffinity linked with cell membrane or extract preparations that express the receptor molecule. Cross-linked material is resolved by PAGE analysis and exposed to X-ray film. The labeled complex containing the receptors of the polypeptides can be excised, resolved into peptide fragments, and subjected to protein microsequencing. The amino acid sequence obtained from microsequencing would be used to design a set of degenerate oligonucleotide probes to screen a cDNA library to identify the genes encoding the putative receptors.

[0753] Moreover, the techniques of gene-shuffling, motif-shuffling, exon-shuffling, and/or codon-shuffling (collectively referred to as “DNA shuffling”) may be employed to modulate the activities of the polypeptide of the present invention thereby effectively generating agonists and antagonists of the polypeptide of the present invention. See generally, U.S. Pat. Nos. 5,605,793, 5,811,238, 5,830,721, 5,834,252, and 5,837,458, and Patten, P. A., et al., Curr. Opinion Biotechnol. 8:724-33 (1997); Harayama, S. Trends Biotechnol. 16(2):76-82 (1998); Hansson, L. O., et al., J. Mol. Biol. 287:265-76 (1999); and Lorenzo, M. M. and Blasco, R. Biotechniques 24(2):308-13 (1998); each of these patents and publications are hereby incorporated by reference). In one embodiment, alteration of polynucleotides and corresponding polypeptides may be achieved by DNA shuffling. DNA shuffling involves the assembly of two or more DNA segments into a desired molecule by homologous, or site-specific, recombination. In another embodiment, polynucleotides and corresponding polypeptides may be altered by being subjected to random mutagenesis by error-prone PCR, random nucleotide insertion or other methods prior to recombination. In another embodiment, one or more components, motifs, sections, parts, domains, fragments, etc., of the polypeptide of the present invention may be recombined with one or more components, motifs, sections, parts, domains, fragments, etc. of one or more heterologous molecules. In preferred embodiments, the heterologous molecules are family members. In further preferred embodiments, the heterologous molecule is a growth factor such as, for example, platelet-derived growth factor (PDGF), insulin-like growth factor (IGF-1), transforming growth factor (TGF)-alpha, epidermal growth factor (EGF), fibroblast growth factor (FGF), TGF-beta, bone morphogenetic protein (BMP)-2, BMP-4, BMP-5, BMP-6, BMP-7, activins A and B, decapentaplegic(dpp), 60A, OP-2, dorsalin, growth differentiation factors (GDFs), nodal, MIS, inhibin-alpha, TGF-beta1, TGF-beta2, TGF-beta3, TGF-beta5, and glial-derived neurotrophic factor (GDNF).

[0754] Other preferred fragments are biologically active fragments of the polypeptide of the present invention. Biologically active fragments are those exhibiting activity similar, but not necessarily identical, to an activity of the polypeptide of the present invention. The biological activity of the fragments may include an improved desired activity, or a decreased undesirable activity.

[0755] Additionally, this invention provides a method of screening compounds to identify those which modulate the action of the polypeptide of the present invention. An example of such an assay comprises combining a mammalian fibroblast cell, a the polypeptide of the present invention, the compound to be screened and ³[H] thymidine under cell culture conditions where the fibroblast cell would normally proliferate. A control assay may be performed in the absence of the compound to be screened and compared to the amount of fibroblast proliferation in the presence of the compound to determine if the compound stimulates proliferation by determining the uptake of 3[H] thymidine in each case. The amount of fibroblast cell proliferation is measured by liquid scintillation chromatography which measures the incorporation of ³[H] thymidine. Both agonist and antagonist compounds may be identified by this procedure.

[0756] In another method, a mammalian cell or membrane preparation expressing a receptor for a polypeptide of the present invention is incubated with a labeled polypeptide of the present invention in the presence of the compound. The ability of the compound to enhance or block this interaction could then be measured. Alternatively, the response of a known second messenger system following interaction of a compound to be screened and the receptor is measured and the ability of the compound to bind to the receptor and elicit a second messenger response is measured to determine if the compound is a potential agonist or antagonist. Such second messenger systems include but are not limited to, cAMP guanylate cyclase, ion channels or phosphoinositide hydrolysis.

[0757] All of these above assays can be used as diagnostic or prognostic markers. The molecules discovered using these assays can be used to treat disease or to bring about a particular result in a patient (e.g., blood vessel growth) by activating or inhibiting the polypeptide/molecule. Moreover, the assays can discover agents which may inhibit or enhance the production of the polypeptides of the invention from suitably manipulated cells or tissues.

[0758] Therefore, the invention includes a method of identifying compounds which bind to a polypeptide of the invention comprising the steps of: (a) incubating a candidate binding compound with a polypeptide of the present invention; and (b) determining if binding has occurred. Moreover, the invention includes a method of identifying agonists/antagonists comprising the steps of: (a) incubating a candidate compound with a polypeptide of the present invention, (b) assaying a biological activity, and (b) determining if a biological activity of the polypeptide has been altered.

[0759] Targeted Delivery

[0760] In another embodiment, the invention provides a method of delivering compositions to targeted cells expressing a receptor for a polypeptide of the invention, or cells expressing a cell bound form of a polypeptide of the invention.

[0761] As discussed herein, polypeptides or antibodies of the invention may be associated with heterologous polypeptides, heterologous nucleic acids, toxins, or prodrugs via hydrophobic, hydrophilic, ionic and/or covalent interactions. In one embodiment, the invention provides a method for the specific delivery of compositions of the invention to cells by administering polypeptides of the invention (including antibodies) that are associated with heterologous polypeptides or nucleic acids. In one example, the invention provides a method for delivering a therapeutic protein into the targeted cell. In another example, the invention provides a method for delivering a single stranded nucleic acid (e.g., antisense or ribozymes) or double stranded nucleic acid (e.g., DNA that can integrate into the cell's genome or replicate episomally and that can be transcribed) into the targeted cell.

[0762] In another embodiment, the invention provides a method for the specific destruction of cells (e.g., the destruction of tumor cells) by administering polypeptides of the invention (e.g., polypeptides of the invention or antibodies of the invention) in association with toxins or cytotoxic prodrugs.

[0763] By “toxin” is meant compounds that bind and activate endogenous cytotoxic effector systems, radioisotopes, holotoxins, modified toxins, catalytic subunits of toxins, or any molecules or enzymes not normally present in or on the surface of a cell that under defined conditions cause the cell's death. Toxins that may be used according to the methods of the invention include, but are not limited to, radioisotopes known in the art, compounds such as, for example, antibodies (or complement fixing containing portions thereof) that bind an inherent or induced endogenous cytotoxic effector system, thymidine kinase, endonuclease, RNAse, alpha toxin, ricin, abrin, Pseudomonas exotoxin A, diphtheria toxin, saporin, momordin, gelonin, pokeweed antiviral protein, alpha-sarcin and cholera toxin. By “cytotoxic prodrug” is meant a non-toxic compound that is converted by an enzyme, normally present in the cell, into a cytotoxic compound. Cytotoxic prodrugs that may be used according to the methods of the invention include, but are not limited to, glutamyl derivatives of benzoic acid mustard alkylating agent, phosphate derivatives of etoposide or mitomycin C, cytosine arabinoside, daunorubisin, and phenoxyacetamide derivatives of doxorubicin.

[0764] Drug Screening

[0765] Further contemplated is the use of the polypeptides of the present invention, or the polynucleotides encoding these polypeptides, to screen for molecules which modify the activities of the polypeptides of the present invention. Such a method would include contacting the polypeptide of the present invention with a selected compound(s) suspected of having antagonist or agonist activity, and assaying the activity of these polypeptides following binding.

[0766] This invention is particularly useful for screening therapeutic compounds by using the polypeptides of the present invention, or binding fragments thereof, in any of a variety of drug screening techniques. The polypeptide or fragment employed in such a test may be affixed to a solid support, expressed on a cell surface, free in solution, or located intracellularly. One method of drug screening utilizes eukaryotic or prokaryotic host cells which are stably transformed with recombinant nucleic acids expressing the polypeptide or fragment. Drugs are screened against such transformed cells in competitive binding assays. One may measure, for example, the formulation of complexes between the agent being tested and a polypeptide of the present invention.

[0767] Thus, the present invention provides methods of screening for drugs or any other agents which affect activities mediated by the polypeptides of the present invention. These methods comprise contacting such an agent with a polypeptide of the present invention or a fragment thereof and assaying for the presence of a complex between the agent and the polypeptide or a fragment thereof, by methods well known in the art. In such a competitive binding assay, the agents to screen are typically labeled. Following incubation, free agent is separated from that present in bound form, and the amount of free or uncomplexed label is a measure of the ability of a particular agent to bind to the polypeptides of the present invention.

[0768] Another technique for drug screening provides high throughput screening for compounds having suitable binding affinity to the polypeptides of the present invention, and is described in great detail in European Patent Application 84/03564, published on Sep. 13, 1984, which is incorporated herein by reference herein. Briefly stated, large numbers of different small peptide test compounds are synthesized on a solid substrate, such as plastic pins or some other surface. The peptide test compounds are reacted with polypeptides of the present invention and washed. Bound polypeptides are then detected by methods well known in the art. Purified polypeptides are coated directly onto plates for use in the aforementioned drug screening techniques. In addition, non-neutralizing antibodies may be used to capture the peptide and immobilize it on the solid support.

[0769] This invention also contemplates the use of competitive drug screening assays in which neutralizing antibodies capable of binding polypeptides of the present invention specifically compete with a test compound for binding to the polypeptides or fragments thereof. In this manner, the antibodies are used to detect the presence of any peptide which shares one or more antigenic epitopes with a polypeptide of the invention.

[0770] Antisense and Ribozyme (Antagonists)

[0771] In specific embodiments, antagonists according to the present invention are nucleic acids corresponding to the sequences contained in SEQ ID NO:X, or the complementary strand thereof, and/or to cDNA sequences contained in cDNA Clone ID NO:Z identified for example, in Table 1A. In one embodiment, antisense sequence is generated internally, by the organism, in another embodiment, the antisense sequence is separately administered (see, for example, O'Connor, J., Neurochem. 56:560 (1991). Oligodeoxynucleotides as Antisense Inhibitors of Gene Expression, CRC Press, Boca Raton, Fla. (1988). Antisense technology can be used to control gene expression through antisense DNA or RNA, or through triple-helix formation. Antisense techniques are discussed for example, in Okano, J., Neurochem. 56:560 (1991); Oligodeoxynucleotides as Antisense Inhibitors of Gene Expression, CRC Press, Boca Raton, Fla. (1988). Triple helix formation is discussed in, for instance, Lee et al., Nucleic Acids Research 6:3073 (1979); Cooney et al., Science 241:456 (1988); and Dervan et al., Science 251:1300 (1991). The methods are based on binding of a polynucleotide to a complementary DNA or RNA.

[0772] For example, the use of c-myc and c-myb antisense RNA constructs to inhibit the growth of the non-lymphocytic leukemia cell line HL-60 and other cell lines was previously described. (Wickstrom et al. (1988); Anfossi et al. (1989)). These experiments were performed in vitro by incubating cells with the oligoribonucleotide. A similar procedure for in vivo use is described in WO 91/15580. Briefly, a pair of oligonucleotides for a given antisense RNA is produced as follows: A sequence complimentary to the first 15 bases of the open reading frame is flanked by an EcoRI site on the 5 end and a HindIII site on the 3 end. Next, the pair of oligonucleotides is heated at 90° C. for one minute and then annealed in 2×ligation buffer (20 mM TRIS HCl pH 7.5, 10 mM MgCl2, 10 MM dithiothreitol (DTT) and 0.2 mM ATP) and then ligated to the EcoRI/ind III site of the retroviral vector PMV7 (WO 91/15580).

[0773] For example, the 5′ coding portion of a polynucleotide that encodes the polypeptide of the present invention may be used to design an antisense RNA oligonucleotide of from about 10 to 40 base pairs in length. A DNA oligonucleotide is designed to be complementary to a region of the gene involved in transcription thereby preventing transcription and the production of the receptor. The antisense RNA oligonucleotide hybridizes to the mRNA in vivo and blocks translation of the mRNA molecule into receptor polypeptide.

[0774] In one embodiment, the antisense nucleic acid of the invention is produced intracellularly by transcription from an exogenous sequence. For example, a vector or a portion thereof, is transcribed, producing an antisense nucleic acid (RNA) of the invention. Such a vector would contain a sequence encoding the antisense nucleic acid. Such a vector can remain episomal or become chromosomally integrated, as long as it can be transcribed to produce the desired antisense RNA. Such vectors can be constructed by recombinant DNA technology methods standard in the art. Vectors can be plasmid, viral, or others known in the art, used for replication and expression in vertebrate cells. Expression of the sequence encoding the polypeptide of the present invention or fragments thereof, can be by any promoter known in the art to act in vertebrate, preferably human cells. Such promoters can be inducible or constitutive. Such promoters include, but are not limited to, the SV40 early promoter region (Bernoist and Chambon, Nature 29:304-310 (1981), the promoter contained in the 3′ long terminal repeat of Rous sarcoma virus (Yamamoto et al., Cell 22:787-797 (1980), the herpes thymidine promoter (Wagner et al., Proc. Natl. Acad. Sci. U.S.A. 78:1441-1445 (1981), the regulatory sequences of the metallothionein gene (Brinster, et al., Nature 296:39-42 (1982)), etc.

[0775] The antisense nucleic acids of the invention comprise a sequence complementary to at least a portion of an RNA transcript of a gene of the present invention. However, absolute complementarity, although preferred, is not required. A sequence “complementary to at least a portion of an RNA,” referred to herein, means a sequence having sufficient complementarity to be able to hybridize with the RNA, forming a stable duplex; in the case of double stranded antisense nucleic acids, a single strand of the duplex DNA may thus be tested, or triplex formation may be assayed. The ability to hybridize will depend on both the degree of complementarity and the length of the antisense nucleic acid. Generally, the larger the hybridizing nucleic acid, the more base mismatches with a RNA it may contain and still form a stable duplex (or triplex as the case may be). One skilled in the art can ascertain a tolerable degree of mismatch by use of standard procedures to determine the melting point of the hybridized complex.

[0776] Oligonucleotides that are complementary to the 5′ end of the message, e.g., the 5′ untranslated sequence up to and including the AUG initiation codon, should work most efficiently at inhibiting translation. However, sequences complementary to the 3′ untranslated sequences of mRNAs have been shown to be effective at inhibiting translation of mRNAs as well. See generally, Wagner, R., 1994, Nature 372:333-335. Thus, oligonucleotides complementary to either the 5′- or 3′-non-translated, non-coding regions of polynucleotide sequences described herein could be used in an antisense approach to inhibit translation of endogenous mRNA. Oligonucleotides complementary to the 5′ untranslated region of the mRNA should include the complement of the AUG start codon. Antisense oligonucleotides complementary to mRNA coding regions are less efficient inhibitors of translation but could be used in accordance with the invention. Whether designed to hybridize to the 5′-, 3′- or coding region of mRNA of the present invention, antisense nucleic acids should be at least six nucleotides in length, and are preferably oligonucleotides ranging from 6 to about 50 nucleotides in length. In specific aspects the oligonucleotide is at least 10 nucleotides, at least 17 nucleotides, at least 25 nucleotides or at least 50 nucleotides.

[0777] The polynucleotides of the invention can be DNA or RNA or chimeric mixtures or derivatives or modified versions thereof, single-stranded or double-stranded. The oligonucleotide can be modified at the base moiety, sugar moiety, or phosphate backbone, for example, to improve stability of the molecule, hybridization, etc. The oligonucleotide may include other appended groups such as peptides (e.g., for targeting host cell receptors in vivo), or agents facilitating transport across the cell membrane (see, e.g., Letsinger et al., 1989, Proc. Natl. Acad. Sci. U.S.A. 86:6553-6556; Lemaitre et al., 1987, Proc. Natl. Acad. Sci. 84:648-652; PCT Publication No. WO88/09810, published Dec. 15, 1988) or the blood-brain barrier (see, e.g., PCT Publication No. WO89/10134, published Apr. 25, 1988), hybridization-triggered cleavage agents. (See, e.g., Krol et al., 1988, BioTechniques 6:958-976) or intercalating agents. (See, e.g., Zon, 1988, Pharm. Res. 5:539-549). To this end, the oligonucleotide may be conjugated to another molecule, e.g., a peptide, hybridization triggered cross-linking agent, transport agent, hybridization-triggered cleavage agent, etc.

[0778] The antisense oligonucleotide may comprise at least one modified base moiety which is selected from the group including, but not limited to, 5-fluorouracil, 5-bromouracil, 5-chlorouracil, 5-iodouracil, hypoxanthine, xantine, 4-acetylcytosine, 5-(carboxyhydroxylmethyl) uracil, 5-carboxymethylaminomethyl-2-thiouridine, 5-carboxymethylaminomethyluracil, dihydrouracil, beta-D-galactosylqueosine, inosine, N6-isopentenyladenine, 1-methylguanine, 1-methylinosine, 2,2-dimethylguanine, 2-methyladenine, 2-methylguanine, 3-methylcytosine, 5-methylcytosine, N6-adenine, 7-methylguanine, 5-methylaminomethyluracil, 5-methoxyaminomethyl-2-thiouracil, beta-D-mannosylqueosine, 5′-methoxycarboxymethyluracil, 5-methoxyuracil, 2-methylthio-N-6-isopentenyladenine, uracil-5-oxyacetic acid (v), wybutoxosine, pseudouracil, queosine, 2-thiocytosine, 5-methyl-2-thiouracil, 2-thiouracil, 4-thiouracil, 5-methyluracil, uracil-5-oxyacetic acid methylester, uracil-5-oxyacetic acid (v), 5-methyl-2-thiouracil, 3-(3-amino-3-N-2-carboxypropyl) uracil, (acp3)w, and 2,6-diaminopurine.

[0779] The antisense otigonucleotide may also comprise at least one modified sugar moiety selected from the group including, but not limited to, arabinose, 2-fluoroarabinose, xylulose, and hexose.

[0780] In yet another embodiment, the antisense oligonucleotide comprises at least one modified phosphate backbone selected from the group including, but not limited to, a phosphorothioate, a phosphorodithioate, a phosphoramidothioate, a phosphoramidate, a phosphordiamidate, a methylphosphonate, an alkyl phosphotriester, and a formacetal or analog thereof.

[0781] In yet another embodiment, the antisense oligonucleotide is an a-anomeric oligonucleotide. An a-anomeric oligonucleotide forms specific double-stranded hybrids with complementary RNA in which, contrary to the usual b-units, the strands mn parallel to each other (Gautier et al., 1987, Nucl. Acids Res. 15:6625-6641). The oligonucleotide is a 2′-O-methylribonucleotide (Inoue et al., 1987, Nucl. Acids Res. 15:6131-6148), or a chimeric RNA-DNA analogue (Inoue et al., 1987, FEBS Lett. 215:327-330).

[0782] Polynucleotides of the invention may be synthesized by standard methods known in the art, e.g. by use of an automated DNA synthesizer (such as are commercially available from Biosearch, Applied Biosystems, etc.). As examples, phosphorothioate oligonucleotides may be synthesized by the method of Stein et al. (1988, Nucl. Acids Res. 16:3209), methylphosphonate oligonucleotides can be prepared by use of controlled pore glass polymer supports (Sarin et al., 1988, Proc. Natl. Acad. Sci. U.S.A. 85:7448-7451), etc.

[0783] While antisense nucleotides complementary to the coding region sequence could be used, those complementary to the transcribed untranslated region are most preferred.

[0784] Potential antagonists according to the invention also include catalytic RNA, or a ribozyme (See, e.g., PCT International Publication WO 90/11364, published Oct. 4, 1990; Sarver et al, Science 247:1222-1225 (1990). While ribozymes that cleave mRNA at site specific recognition sequences can be used to destroy mRNAs, the use of hammerhead ribozymes is preferred. Hammerhead ribozymes cleave mRNAs at locations dictated by flanking regions that form complementary base pairs with the target mRNA. The sole requirement is that the target mRNA have the following sequence of two bases: 5′-UG-3′. The construction and production of hammerhead ribozymes is well known in the art and is described more fully in Haseloff and Gerlach, Nature 334:585-591 (1988). There are numerous potential hammerhead ribozyme cleavage sites within the nucleotide sequence of SEQ ID NO:X. Preferably, the ribozyme is engineered so that the cleavage recognition site is located near the 5′ end of the mRNA; i.e., to increase efficiency and minimize the intracellular accumulation of non-functional mRNA transcripts.

[0785] As in the antisense approach, the ribozymes of the invention can be composed of modified oligonucleotides (e.g., for improved stability, targeting, etc.) and should be delivered to cells which express in vivo. DNA constructs encoding the ribozyme may be introduced into the cell in the same manner as described above for the introduction of antisense encoding DNA. A preferred method of delivery involves using a DNA construct “encoding” the ribozyme under the control of a strong constitutive promoter, such as, for example, pot III or pot II promoter, so that transfected cells will produce sufficient quantities of the ribozyme to destroy endogenous messages and inhibit translation. Since ribozymes unlike antisense molecules, are catalytic, a lower intracellular concentration is required for efficiency.

[0786] Antagonist/agonist compounds may be employed to inhibit the cell growth and proliferation effects of the polypeptides of the present invention on neoplastic cells and tissues, i.e. stimulation of angiogenesis of tumors, and, therefore, retard or prevent abnormal cellular growth and proliferation, for example, in tumor formation or growth.

[0787] The antagonist/agonist may also be employed to prevent hyper-vascular diseases, and prevent the proliferation of epithelial lens cells after extracapsular cataract surgery. Prevention of the mitogenic activity of the polypeptides of the present invention may also be desirous in cases such as restenosis after balloon angioplasty.

[0788] The antagonist/agonist may also be employed to prevent the growth of scar tissue during wound healing.

[0789] The antagonist/agonist may also be employed to treat the diseases described herein.

[0790] Thus, the invention provides a method of treating disorders or diseases, including but not limited to the disorders or diseases listed throughout this application, associated with overexpression of a polynucleotide of the present invention by administering to a patient (a) an antisense molecule directed to the polynucleotide of the present invention, and/or (b) a ribozyme directed to the polynucleotide of the present invention.

[0791] Binding Peptides and Other Molecules

[0792] The invention also encompasses screening methods for identifying polypeptides and nonpolypeptides that bind polypeptides of the invention, and the binding molecules identified thereby. These binding molecules are useful, for example, as agonists and antagonists of the polypeptides of the invention. Such agonists and antagonists can be used, in accordance with the invention, in the therapeutic embodiments described in detail, below.

[0793] This method comprises the steps of:

[0794] a. contacting polypeptides of the invention with a plurality of molecules; and

[0795] b. identifying a molecule that binds the polypeptides of the invention.

[0796] The step of contacting the polypeptides of the invention with the plurality of molecules may be effected in a number of ways. For example, one may contemplate immobilizing the polypeptides on a solid support and bringing a solution of the plurality of molecules in contact with the immobilized polypeptides. Such a procedure would be akin to an affinity chromatographic process, with the affinity matrix being comprised of the immobilized polypeptides of the invention. The molecules having a selective affinity for the polypeptides can then be purified by affinity selection. The nature of the solid support, process for attachment of the polypeptides to the solid support, solvent, and conditions of the affinity isolation or selection are largely conventional and well known to those of ordinary skill in the art.

[0797] Alternatively, one may also separate a plurality of polypeptides into substantially separate fractions comprising a subset of or individual polypeptides. For instance, one can separate the plurality of polypeptides by gel electrophoresis, column chromatography, or like method known to those of ordinary skill for the separation of polypeptides. The individual polypeptides can also be produced by a transformed host cell in such a way as to be expressed on or about its outer surface (e.g., a recombinant phage). Individual isolates can then be “probed” by the polypeptides of the invention, optionally in the presence of an inducer should one be required for expression, to determine if any selective affinity interaction takes place between the polypeptides and the individual clone. Prior to contacting the polypeptides with each fraction comprising individual polypeptides, the polypeptides could first be transferred to a solid support for additional convenience. Such a solid support may simply be a piece of filter membrane, such as one made of nitrocellulose or nylon. In this manner, positive clones could be identified from a collection of transformed host cells of an expression library, which harbor a DNA construct encoding a polypeptide having a selective affinity for polypeptides of the invention. Furthermore, the amino acid sequence of the polypeptide having a selective affinity for the polypeptides of the invention can be determined directly by conventional means or the coding sequence of the DNA encoding the polypeptide can frequently be determined more conveniently. The primary sequence can then be deduced from the corresponding DNA sequence. If the amino acid sequence is to be determined from the polypeptide itself, one may use microsequencing techniques. The sequencing technique may include mass spectroscopy.

[0798] In certain situations, it may be desirable to wash away any unbound polypeptides from a mixture of the polypeptides of the invention and the plurality of polypeptides prior to attempting to determine or to detect the presence of a selective affinity interaction. Such a wash step may be particularly desirable when the polypeptides of the invention or the plurality of polypeptides are bound to a solid support.

[0799] The plurality of molecules provided according to this method may be provided by way of diversity libraries, such as random or combinatorial peptide or nonpeptide libraries which can be screened for molecules that specifically bind polypeptides of the invention. Many libraries are known in the art that can be used, e.g., chemically synthesized libraries, recombinant (e.g., phage display libraries), and in vitro translation-based libraries. Examples of chemically synthesized libraries are described in Fodor et al., 1991, Science 251:767-773; Houghten et al., 1991, Nature 354:84-86; Lam et al., 1991, Nature 354:82-84; Medynski, 1994, Bio/Technology 12:709-710;Gallop et al., 1994, J. Medicinal Chemistry 37(9):1233-1251; Ohlmeyer et al., 1993, Proc. Natl. Acad. Sci. USA 90:10922-10926; Erb et al., 1994, Proc. Natl. Acad. Sci. USA 91:11422-11426; Houghten et al., 1992, Biotechniques 13:412; Jayawickreme et al., 1994, Proc. Natl. Acad. Sci. USA 91:1614-1618; Salmon et al., 1993, Proc. Natl. Acad. Sci. USA 90:11708-11712; PCT Publication No. WO 93/20242; and Brenner and Lemer, 1992, Proc. Natl. Acad. Sci. USA 89:5381-5383.

[0800] Examples of phage display libraries are described in Scott and Smith, 1990, Science 249:386-390; Devlin et al., 1990, Science, 249:404-406; Christian, R. B., et al., 1992, J. Mol. Biol. 227:711-718); Lenstra, 1992, J. Immunol. Meth. 152:149-157; Kay et al., 1993, Gene 128:59-65; and PCT Publication No. WO 94/18318 dated Aug. 18, 1994.

[0801] In vitro translation-based libraries include but are not limited to those described in PCT Publication No. WO 91/05058 dated Apr. 18, 1991; and Mattheakis et al., 1994, Proc. Natl. Acad. Sci. USA 91:9022-9026.

[0802] By way of examples of nonpeptide libraries, a benzodiazepine library (see e.g., Bunin et al., 1994, Proc. Natl. Acad. Sci. USA 91:4708-4712) can be adapted for use. Peptoid libraries (Simon et al., 1992, Proc. Natl. Acad. Sci. USA 89:9367-9371) can also be used. Another example of a library that can be used, in which the amide functionalities in peptides have been permethylated to generate a chemically transformed combinatorial library, is described by Ostresh et al. (1994, Proc. Natl. Acad. Sci. USA 91:11138-11142).

[0803] The variety of non-peptide libraries that are useful in the present invention is great. For example, Ecker and Crooke, 1995, Bio/Technology 13:351-360 list benzodiazepines, hydantoins, piperazinediones, biphenyls, sugar analogs, beta-mercaptoketones, arylacetic acids, acylpiperidines, benzopyrans, cubanes, xanthines, aminimides, and oxazolones as among the chemical species that form the basis of various libraries.

[0804] Non-peptide libraries can be classified broadly into two types: decorated monomers and oligomers. Decorated monomer libraries employ a relatively simple scaffold structure upon which a variety functional groups is added. Often the scaffold will be a molecule with a known useful pharmacological activity. For example, the scaffold might be the benzodiazepine structure.

[0805] Non-peptide oligomer libraries utilize a large number of monomers that are assembled together in ways that create new shapes that depend on the order of the monomers. Among the monomer units that have been used are carbamates, pyrrolinones, and morpholinos. Peptoids, peptide-like oligomers in which the side chain is attached to the alpha amino group rather than the alpha carbon, form the basis of another version of non-peptide oligomer libraries. The first non-peptide oligomer libraries utilized a single type of monomer and thus contained a repeating backbone. Recent libraries have utilized more than one monomer, giving the libraries added flexibility.

[0806] Screening the libraries can be accomplished by any of a variety of commonly known methods. See, e.g., the following references, which disclose screening of peptide libraries: Parmley and Smith, 1989, Adv. Exp. Med. Biol. 251:215-218; Scott and Smith, 1990, Science 249:386-390; Fowlkes et al., 1992; BioTechniques 13:422-427; Oldenburg et al., 1992, Proc. Natl. Acad. Sci. USA 89:5393-5397; Yu et al., 1994, Cell 76:933-945; Staudt et al., 1988, Science 241:577-580; Bock et al., 1992, Nature 355:564-566; Tuerk et al., 1992, Proc. Natl. Acad. Sci. USA 89:6988-6992; Ellington et al., 1992, Nature 355:850-852; U.S. Pat. No. 5,096,815, U.S. Pat. No. 5,223,409, and U.S. Pat. No. 5,198,346, all to Ladner et al.; Rebar and Pabo, 1993, Science 263:671-673; and CT Publication No. WO 94/18318.

[0807] In a specific embodiment, screening to identify a molecule that binds polypeptides of the invention can be carried out by contacting the library members with polypeptides of the invention immobilized on a solid phase and harvesting those library members that bind to the polypeptides of the invention. Examples of such screening methods, termed “panning” techniques are described by way of example in Parmley and Smith, 1988, Gene 73:305-318; Fowlkes et al., 1992, BioTechniques 13:422-427; PCT Publication No. WO 94/18318; and in references cited herein.

[0808] In another embodiment, the two-hybrid system for selecting interacting proteins in yeast (Fields and Song, 1989, Nature 340:245-246; Chien et al., 1991, Proc. Natl. Acad. Sci. USA 88:9578-9582) can be used to identify molecules that specifically bind to polypeptides of the invention.

[0809] Where the binding molecule is a polypeptide, the polypeptide can be conveniently selected from any peptide library, including random peptide libraries, combinatorial peptide libraries, or biased peptide libraries. The term “biased” is used herein to mean that the method of generating the library is manipulated so as to restrict one or more parameters that govern the diversity of the resulting collection of molecules, in this case peptides.

[0810] Thus, a truly random peptide library would generate a collection of peptides in which the probability of finding a particular amino acid at a given position of the peptide is the same for all 20 amino acids. A bias can be introduced into the library, however, by specifying, for example, that a lysine occur every fifth amino acid or that positions 4, 8, and 9 of a decapeptide library be fixed to include only arginine. Clearly, many types of biases can be contemplated, and the present invention is not restricted to any particular bias. Furthermore, the present invention contemplates specific types of peptide libraries, such as phage displayed peptide libraries and those that utilize a DNA construct comprising a lambda phage vector with a DNA insert.

[0811] As mentioned above, in the case of a binding molecule that is a polypeptide, the polypeptide may have about 6 to less than about 60 amino acid residues, preferably about 6 to about 10 amino acid residues, and most preferably, about 6 to about 22 amino acids. In another embodiment, a binding polypeptide has in the range of 15-100 amino acids, or 20-50 amino acids. L7591 The selected binding polypeptide can be obtained by chemical synthesis or recombinant expression.

[0812] Other Activities

[0813] A polypeptide, polynucleotide, agonist, or antagonist of the present invention, as a result of the ability to stimulate vascular endothelial cell growth, may be employed in treatment for stimulating re-vascularization of ischemic tissues due to various disease conditions such as thrombosis, arteriosclerosis, and other cardiovascular conditions. The polypeptide, polynucleotide, agonist, or antagonist of the present invention may also be employed to stimulate angiogenesis and limb regeneration, as discussed above.

[0814] A polypeptide, polynucleotide, agonist, or antagonist of the present invention may also be employed for treating wounds due to injuries, burns, post-operative tissue repair, and ulcers since they are mitogenic to various cells of different origins, such as fibroblast cells and skeletal muscle cells, and therefore, facilitate the repair or replacement of damaged or diseased tissue.

[0815] A polypeptide, polynucleotide, agonist, or antagonist of the present invention may also be employed stimulate neuronal growth and to treat and prevent neuronal damage which occurs in certain neuronal disorders or neuro-degenerative conditions such as Alzheimer's disease, Parkinson's disease, and AIDS-related complex. A polypeptide, polynucleotide, agonist, or antagonist of the present invention may have the ability to stimulate chondrocyte growth, therefore, they may be employed to enhance bone and periodontal regeneration and aid in tissue transplants or bone grafts.

[0816] A polypeptide, polynucleotide, agonist, or antagonist of the present invention may be also be employed to prevent skin aging due to sunburn by stimulating keratinocyte growth.

[0817] A polypeptide, polynucleotide, agonist, or antagonist of the present invention may also be employed for preventing hair loss, since FGF family members activate hair-forming cells and promotes melanocyte growth. Along the same lines, a polypeptide, polynucleotide, agonist, or antagonist of the present invention may be employed to stimulate growth and differentiation of hematopoietic cells and bone marrow cells when used in combination with other cytokines.

[0818] A polypeptide, polynucleotide, agonist, or antagonist of the present invention may also be employed to maintain organs before transplantation or for supporting cell culture of primary tissues. A polypeptide, polynucleotide, agonist, or antagonist of the present invention may also be employed for inducing tissue of mesodermal origin to differentiate in early embryos.

[0819] A polypeptide, polynucleotide, agonist, or antagonist of the present invention may also increase or decrease the differentiation or proliferation of embryonic stem cells, besides, as discussed above, hematopoietic lineage.

[0820] A polypeptide, polynucleotide, agonist, or antagonist of the present invention may also be used to modulate mammalian characteristics, such as body height, weight, hair color, eye color, skin, percentage of adipose tissue, pigmentation, size, and shape (e.g., cosmetic surgery). Similarly, a polypeptide, polynucleotide, agonist, or antagonist of the present invention may be used to modulate mammalian metabolism affecting catabolism, anabolism, processing, utilization, and storage of energy.

[0821] A polypeptide, polynucleotide, agonist, or antagonist of the present invention may be used to change a mammal's mental state or physical state by influencing biorhythms, caricadic rhythms, depression (including depressive disorders), tendency for violence, tolerance for pain, reproductive capabilities (preferably by Activin or Inhibin-like activity), hormonal or endocrine levels, appetite, libido, memory, stress, or other cognitive qualities.

[0822] A polypeptide, polynucleotide, agonist, or antagonist of the present invention may also be used as a food additive or preservative, such as to increase or decrease storage capabilities, fat content, lipid, protein, carbohydrate, vitamins, minerals, cofactors or other nutritional components.

[0823] The above-recited applications have uses in a wide variety of hosts. Such hosts include, but are not limited to, human, murine, rabbit, goat, guinea pig, camel, horse, mouse, rat, hamster, pig, micro-pig, chicken, goat, cow, sheep, dog, cat, non-human primate, and human. In specific embodiments, the host is a mouse, rabbit, goat, guinea pig, chicken, rat, hamster, pig, sheep, dog or cat. In preferred embodiments, the host is a mammal. In most preferred embodiments, the host is a human.

[0824] Other Preferred Embodiments

[0825] Other preferred embodiments of the claimed invention include an isolated nucleic acid molecule comprising a nucleotide sequence which is at least 95% identical to a sequence of at least about 50 contiguous nucleotides in the nucleotide sequence of SEQ ID NO:X or the complementary strand thereto, the nucleotide sequence as defined in column 5 of Table 1A or columns 8 and 9 of Table 2 or the complementary strand thereto, and/or cDNA contained in Clone ID NO:Z.

[0826] Also preferred is a nucleic acid molecule wherein said sequence of contiguous nucleotides is included in the nucleotide sequence of the portion of SEQ ID NO:X as defined in column 5, “ORF (From-To)”, in Table 1A.

[0827] Also preferred is a nucleic acid molecule wherein said sequence of contiguous nucleotides is included in the nucleotide sequence of the portion of SEQ ID NO:X as defined in columns 8 and 9, “NT From” and “NT To” respectively, in Table 2.

[0828] Also preferred is an isolated nucleic acid molecule comprising a nucleotide sequence which is at least 95% identical to a sequence of at least about 150 contiguous nucleotides in the nucleotide sequence of SEQ ID NO:X or the complementary strand thereto, the nucleotide sequence as defined in column 5 of Table 1A or columns 8 and 9 of Table 2 or the complementary strand thereto, and/or cDNA contained in Clone ID NO:Z.

[0829] Further preferred is an isolated nucleic acid molecule comprising a nucleotide sequence which is at least 95% identical to a sequence of at least about 500 contiguous nucleotides in the nucleotide sequence of SEQ ID NO:X or the complementary strand thereto, the nucleotide sequence as defined in column 5 of Table 1A or columns 8 and 9 of Table 2 or the complementary strand thereto, and/or cDNA contained in Clone ID NO:Z.

[0830] A further preferred embodiment is a nucleic acid molecule comprising a nucleotide sequence which is at least 95% identical to the nucleotide sequence of the portion of SEQ ID NO:X defined in column 5, “ORF (From-To)”, in Table 1A.

[0831] A further preferred embodiment is a nucleic acid molecule comprising a nucleotide sequence which is at least 95% identical to the nucleotide sequence of the portion of SEQ ID NO:X defined in columns 8 and 9, “NT From” and “NT To”, respectively, in Table 2.

[0832] A further preferred embodiment is an isolated nucleic acid molecule comprising a nucleotide sequence which is at least 95% identical to the complete nucleotide sequence of SEQ ID NO:X or the complementary strand thereto, the nucleotide sequence as defined in column 5 of Table 1A or columns 8 and 9 of Table 2 or the complementary strand thereto, and/or cDNA contained in Clone ID NO:Z.

[0833] Also preferred is an isolated nucleic acid molecule which hybridizes under stringent hybridization conditions to a nucleic acid molecule comprising a nucleotide sequence of SEQ ID NO:X or the complementary strand thereto, the nucleotide sequence as defined in column 5 of Table 1A or columns 8 and 9 of Table 2 or the complementary strand thereto, and/or cDNA contained in Clone ID NO:Z, wherein said nucleic acid molecule which hybridizes does not hybridize under stringent hybridization conditions to a nucleic acid molecule having a nucleotide sequence consisting of only A residues or of only T residues.

[0834] Also preferred is a composition of matter comprising a DNA molecule which comprises the cDNA contained in Clone ID NO:Z.

[0835] Also preferred is an isolated nucleic acid molecule comprising a nucleotide sequence which is at least 95% identical to a sequence of at least 50 contiguous nucleotides of the cDNA sequence contained in Clone ID NO:Z.

[0836] Also preferred is an isolated nucleic acid molecule, wherein said sequence of at least 50 contiguous nucleotides is included in the nucleotide sequence of an open reading frame sequence encoded by cDNA contained in Clone ID NO:Z.

[0837] Also preferred is an isolated nucleic acid molecule comprising a nucleotide sequence which is at least 95% identical to sequence of at least 150 contiguous nucleotides in the nucleotide sequence encoded by cDNA contained in Clone ID NO:Z.

[0838] A further preferred embodiment is an isolated nucleic acid molecule comprising a nucleotide sequence which is at least 95% identical to sequence of at least 500 contiguous nucleotides in the nucleotide sequence encoded by cDNA contained in Clone ID NO:Z.

[0839] A further preferred embodiment is an isolated nucleic acid molecule comprising a nucleotide sequence which is at least 95% identical to the complete nucleotide sequence encoded by cDNA contained in Clone ID NO:Z.

[0840] A further preferred embodiment is a method for detecting in a biological sample a nucleic acid molecule comprising a nucleotide sequence which is at least 95% identical to a sequence of at least 50 contiguous nucleotides in a sequence selected from the group consisting of: a nucleotide sequence of SEQ ID NO:X or the complementary strand thereto; the nucleotide sequence as defined in column 5 of Table 1A or columns 8 and 9 of Table 2 or the complementary strand thereto; and a nucleotide sequence encoded by cDNA contained in Clone ID NO:Z; which method comprises a step of comparing a nucleotide sequence of at least one nucleic acid molecule in said sample with a sequence selected from said group and determining whether the sequence of said nucleic acid molecule in said sample is at least 95% identical to said selected sequence.

[0841] Also preferred is the above method wherein said step of comparing sequences comprises determining the extent of nucleic acid hybridization between nucleic acid molecules in said sample and a nucleic acid molecule comprising said sequence selected from said group. Similarly, also preferred is the above method wherein said step of comparing sequences is performed by comparing the nucleotide sequence determined from a nucleic acid molecule in said sample with said sequence selected from said group. The nucleic acid molecules can comprise DNA molecules or RNA molecules.

[0842] A further preferred embodiment is a method for identifying the species, tissue or cell type of a biological sample which method comprises a step of detecting nucleic acid molecules in said sample, if any, comprising a nucleotide sequence that is at least 95% identical to a sequence of at least 50 contiguous nucleotides in a sequence selected from the group consisting of: a nucleotide sequence of SEQ ID NO:X or the complementary strand thereto; the nucleotide sequence as defined in column 5 of Table 1A or columns 8 and 9 of Table 2 or the complementary strand thereto; and a nucleotide sequence of the cDNA contained in Clone ID NO:Z.

[0843] The method for identifying the species, tissue or cell type of a biological sample can comprise a step of detecting nucleic acid molecules comprising a nucleotide sequence in a panel of at least two nucleotide sequences, wherein at least one sequence in said panel is at least 95% identical to a sequence of at least 50 contiguous nucleotides in a sequence selected from said group.

[0844] Also preferred is a method for diagnosing in a subject a pathological condition associated with abnormal structure or expression of a nucleotide sequence of SEQ ID NO:X or the complementary strand thereto; the nucleotide sequence as defined in column 5 of Table 1A or columns 8 and 9 of Table 2 or the complementary strand thereto; or the cDNA contained in Clone ID NO:Z which encodes a protein, wherein the method comprises a step of detecting in a biological sample obtained from said subject nucleic acid molecules, if any, comprising a nucleotide sequence that is at least 95% identical to a sequence of at least 50 contiguous nucleotides in a sequence selected from the group consisting of: a nucleotide sequence of SEQ ID NO:X or the complementary strand thereto; the nucleotide sequence as defined in column 5 of Table 1A or columns 8 and 9 of Table 2 or the complementary strand thereto; and a nucleotide sequence of cDNA contained in Clone ID NO:Z.

[0845] The method for diagnosing a pathological condition can comprise a step of detecting nucleic acid molecules comprising a nucleotide sequence in a panel of at least two nucleotide sequences, wherein at least one sequence in said panel is at least 95% identical to a sequence of at least 50 contiguous nucleotides in a sequence selected from said group.

[0846] Also preferred is a composition of matter comprising isolated nucleic acid molecules wherein the nucleotide sequences of said nucleic acid molecules comprise a panel of at least two nucleotide sequences, wherein at least one sequence in said panel is at least 95% identical to a sequence of at least 50 contiguous nucleotides in a sequence selected from the group consisting of: a nucleotide sequence of SEQ ID NO:X or the complementary strand thereto; the nucleotide sequence as defined in column 5 of Table 1A or columns 8 and 9 of Table 2 or the complementary strand thereto; and a nucleotide sequence encoded by cDNA contained in Clone ID NO:Z. The nucleic acid molecules can comprise DNA molecules or RNA molecules.

[0847] Also preferred is a composition of matter comprising isolated nucleic acid molecules wherein the nucleotide sequences of said nucleic acid molecules comprise a DNA microarray or “chip” of at least 1, 2, 3, 4, 5, 6, 7, 8, 9, 10, 15, 20, 25, 30, 40, 50, 100, 150, 200, 250, 300, 500, 1000, 2000, 3000, or 4000 nucleotide sequences, wherein at least one sequence in said DNA microarray or “chip” is at least 95% identical to a sequence of at least 50 contiguous nucleotides in a sequence selected from the group consisting of: a nucleotide sequence of SEQ ID NO:X wherein X is any integer as defined in Table 1A; and a nucleotide sequence encoded by a human cDNA clone identified by a cDNA “Clone ID” in Table 1A.

[0848] Also preferred is an isolated polypeptide comprising an amino acid sequence at least 90°% identical to a sequence of at least about 10 contiguous amino acids in the polypeptide sequence of SEQ ID NO:Y; a polypeptide encoded by SEQ ID NO:X or the complementary strand thereto; the polypeptide encoded by the nucleotide sequence as defined in columns 8 and 9 of Table 2; and/or a polypeptide encoded by cDNA contained in Clone ID NO:Z.

[0849] Also preferred is an isolated polypeptide comprising an amino acid sequence at least 95% identical to a sequence of at least about 30 contiguous amino acids in the amino acid sequence of SEQ ID NO:Y; a polypeptide encoded by SEQ ID NO:X or the complementary strand thereto; the polypeptide encoded by the nucleotide sequence as defined in columns 8 and 9 of Table 2; and/or a polypeptide encoded by cDNA contained in Clone ID NO:Z.

[0850] Further preferred is an isolated polypeptide comprising an amino acid sequence at least 95% identical to a sequence of at least about 100 contiguous amino acids in the amino acid sequence of SEQ ID NO:Y; a polypeptide encoded by SEQ ID NO:X or the complementary strand thereto; the polypeptide encoded by the nucleotide sequence as defined in columns 8 and 9 of Table 2; and/or a polypeptide encoded by cDNA contained in Clone ID NO:Z.

[0851] Further preferred is an isolated polypeptide comprising an amino acid sequence at least 95% identical to the complete amino acid sequence of SEQ ID NO:Y; a polypeptide encoded by SEQ ID NO:X or the complementary strand thereto; the polypeptide encoded by the nucleotide sequence as defined in columns 8 and 9 of Table 2; and/or a polypeptide encoded by cDNA contained in Clone ID NO:Z.

[0852] Further preferred is an isolated polypeptide comprising an amino acid sequence at least 90% identical to a sequence of at least about 10 contiguous amino acids in the complete amino acid sequence of a polypeptide encoded by contained in Clone ID NO:Z

[0853] Also preferred is a polypeptide wherein said sequence of contiguous amino acids is included in the amino acid sequence of a portion of said polypeptide encoded by cDNA contained in Clone ID NO:Z; a polypeptide encoded by SEQ ID NO:X or the complementary strand thereto; the polypeptide encoded by the nucleotide sequence as defined in columns 8 and 9 of Table 2; and/or the polypeptide sequence of SEQ ID NO:Y.

[0854] Also preferred is an isolated polypeptide comprising an amino acid sequence at least 95% identical to a sequence of at least about 30 contiguous amino acids in the amino acid sequence of a polypeptide encoded by the cDNA contained in Clone ID NO:Z.

[0855] Also preferred is an isolated polypeptide comprising an amino acid sequence at least 95% identical to a sequence of at least about 100 contiguous amino acids in the amino acid sequence of a polypeptide encoded by cDNA contained in Clone ID NO:Z.

[0856] Also preferred is an isolated polypeptide comprising an amino acid sequence at least 95% identical to the amino acid sequence of a polypeptide encoded by the cDNA contained in Clone ID NO:Z.

[0857] Further preferred is an isolated antibody which binds specifically to a polypeptide comprising an amino acid sequence that is at least 90% identical to a sequence of at least 10 contiguous amino acids in a sequence selected from the group consisting of: a polypeptide sequence of SEQ ID NO:Y; a polypeptide encoded by SEQ ID NO:X or the complementary strand thereto; the polypeptide encoded by the nucleotide sequence as defined in columns 8 and 9 of Table 2; and a polypeptide encoded by the cDNA contained in Clone ID NO:Z.

[0858] Further preferred is a method for detecting in a biological sample a polypeptide comprising an amino acid sequence which is at least 90% identical to a sequence of at least 10 contiguous amino acids in a sequence selected from the group consisting of: a polypeptide sequence of SEQ ID NO:Y; a polypeptide encoded by SEQ ID NO:X or the complementary strand thereto; the polypeptide encoded by the nucleotide sequence as defined in columns 8 and 9 of Table 2; and a polypeptide encoded by the cDNA contained in Clone ID NO:Z; which method comprises a step of comparing an amino acid sequence of at least one polypeptide molecule in said sample with a sequence selected from said group and determining whether the sequence of said polypeptide molecule in said sample is at least 90% identical to said sequence of at least 10 contiguous amino acids.

[0859] Also preferred is the above method wherein said step of comparing an amino acid sequence of at least one polypeptide molecule in said sample with a sequence selected from said group comprises determining the extent of specific binding of polypeptides in said sample to an antibody which binds specifically to a polypeptide comprising an amino acid sequence that is at least 90% identical to a sequence of at least 10 contiguous amino acids in a sequence selected from the group consisting of: a polypeptide sequence of SEQ ID NO:Y; a polypeptide encoded by SEQ ID NO:X or the complementary strand thereto; the polypeptide encoded by the nucleotide sequence as defined in columns 8 and 9 of Table 2; and a polypeptide encoded by the cDNA contained in Clone ID NO:Z.

[0860] Also preferred is the above method wherein said step of comparing sequences is performed by comparing the amino acid sequence determined from a polypeptide molecule in said sample with said sequence selected from said group.

[0861] Also preferred is a method for identifying the species, tissue or cell type of a biological sample which method comprises a step of detecting polypeptide molecules in said sample, if any, comprising an amino acid sequence that is at least 90% identical to a sequence of at least 10 contiguous amino acids in a sequence selected from the group consisting of: polypeptide sequence of SEQ ID NO:Y; a polypeptide encoded by SEQ ID NO:X or the complementary strand thereto; the polypeptide encoded by the nucleotide sequence as defined in columns 8 and 9 of Table 2; and a polypeptide encoded by the cDNA contained in Clone ID NO:Z.

[0862] Also preferred is the above method for identifying the species, tissue or cell type of a biological sample, which method comprises a step of detecting polypeptide molecules comprising an amino acid sequence in a panel of at least two amino acid sequences, wherein at feast one sequence in said panel is at least 90% identical to a sequence of at least 10 contiguous amino acids in a sequence selected from the above group.

[0863] Also preferred is a method for diagnosing in a subject a pathological condition associated with abnormal structure or expression of a nucleic acid sequence identified in Table 1A or Table 2 encoding a polypeptide, which method comprises a step of detecting in a biological sample obtained from said subject polypeptide molecules comprising an amino acid sequence in a panel of at least two amino acid sequences, wherein at least one sequence in said panel is at least 90% identical to a sequence of at least 10 contiguous amino acids in a sequence selected from the group consisting of: polypeptide sequence of SEQ ID NO:Y; a polypeptide encoded by SEQ ID NO:X or the complementary strand thereto; the polypeptide encoded by the nucleotide sequence as defined in columns 8 and 9 of Table 2; and a polypeptide encoded by the cDNA contained in Clone ID NO:Z.

[0864] In any of these methods, the step of detecting said polypeptide molecules includes using an antibody.

[0865] Also preferred is an isolated nucleic acid molecule comprising a nucleotide sequence which is at least 95% identical to a nucleotide sequence encoding a polypeptide wherein said polypeptide comprises an amino acid sequence that is at least 90% identical to a sequence of at least 10 contiguous amino acids in a sequence selected from the group consisting of: polypeptide sequence of SEQ ID NO:Y; a polypeptide encoded by SEQ ID NO:X or the complementary strand thereto; the polypeptide encoded by the nucleotide sequence as defined in columns 8 and 9 of Table 2; and a polypeptide encoded by the cDNA contained in Clone ID NO:Z.

[0866] Also preferred is an isolated nucleic acid molecule, wherein said nucleotide sequence encoding a polypeptide has been optimized for expression of said polypeptide in a prokaryotic host.

[0867] Also preferred is a polypeptide molecule, wherein said polypeptide comprises an amino acid sequence selected from the group consisting of: polypeptide sequence of SEQ ID NO:Y; a polypeptide encoded by SEQ ID NO:X or the complementary strand thereto; the polypeptide encoded by the nucleotide sequence as defined in columns 8 and 9 of Table 2; and a polypeptide encoded by the cDNA contained in Clone ID NO:Z.

[0868] Further preferred is a method of making a recombinant vector comprising inserting any of the above isolated nucleic acid molecule into a vector. Also preferred is the recombinant vector produced by this method. Also preferred is a method of making a recombinant host cell comprising introducing the vector into a host cell, as well as the recombinant host cell produced by this method.

[0869] Also preferred is a method of making an isolated polypeptide comprising culturing this recombinant host cell under conditions such that said polypeptide is expressed and recovering said polypeptide. Also preferred is this method of making an isolated polypeptide, wherein said recombinant host cell is a eukaryotic cell and said polypeptide is a human protein comprising an amino acid sequence selected from the group consisting of: polypeptide sequence of SEQ ID NO:Y; a polypeptide encoded by SEQ ID NO:X or the complementary strand thereto; the polypeptide encoded by the nucleotide sequence as defined in columns 8 and 9 of Table 2; and a polypeptide encoded by the cDNA contained in Clone ID NO:Z. The isolated polypeptide produced by this method is also preferred.

[0870] Also preferred is a method of treatment of an individual in need of an increased level of a protein activity, which method comprises administering to such an individual a Therapeutic comprising an amount of an isolated polypeptide, polynucleotide, immunogenic fragment or analogue thereof, binding agent, antibody, or antigen binding fragment of the claimed invention effective to increase the level of said protein activity in said individual.

[0871] Also preferred is a method of treatment of an individual in need of a decreased level of a protein activity, which method comprised administering to such an individual a Therapeutic comprising an amount of an isolated polypeptide, polynucleotide, immunogenic fragment or analogue thereof, binding agent, antibody, or antigen binding fragment of the claimed invention effective to decrease the level of said protein activity in said individual.

[0872] Also preferred is a method of treatment of an individual in need of a specific delivery of toxic compositions to diseased cells (e.g., tumors, leukemias or lymphomas), which method comprises administering to such an individual a Therapeutic comprising an amount of an isolated polypeptide of the invention, including, but not limited to a binding agent, or antibody of the claimed invention that are associated with toxin or cytotoxic prodrugs.

[0873] Having generally described the invention, the same will be more readily understood by reference to the following examples, which are provided by way of illustration and are not intended as limiting.

TABLE 6

| ATCC Deposits | Deposit Date | ATCC Designation Number |
|---|---|---|
| LP01, LP02, LP03, | May 20, 1997 | 209059, 209060, 209061, |
| LP04, LP05, LP06, | | 209062, 209063, 209064, |
| LP07, LP08, LP09, | | 209065, 209066, 209067, |
| LP10, LP11, | | 209068, 209069 |
| LP12 | Jan. 12, 1998 | 209579 |
| LP13 | Jan. 12, 1998 | 209578 |
| LP14 | Jul. 16, 1998 | 203067 |
| LP15 | Jul. 16, 1998 | 203068 |
| LP16 | Feb. 1, 1999 | 203609 |
| LP17 | Feb. 1, 1999 | 203610 |
| LP20 | Nov. 17, 1998 | 203485 |
| LP21 | Jun. 18, 1999 | PTA-252 |
| LP22 | Jun. 18, 1999 | PTA-253 |
| LP23 | Dec. 22, 1999 | PTA-1081 |

### EXAMPLES

### Example 1

### Isolation of a Selected cDNA Clone from the Deposited Sample

[0874] Each Clone ID NO:Z is contained in a plasmid vector. Table 7 identifies the vectors used to construct the cDNA library from which each clone was isolated. In many cases, the vector used to construct the library is a phage vector from which a plasmid has been excised. The following correlates the related plasmid for each phage vector used in constructing the cDNA library. For example, where a particular clone is identified in Table 7 as being isolated in the vector “Lambda Zap,” the corresponding deposited clone is in “pBluescript.”

| Vector Used to Construct Library | Corresponding Deposited Plasmid |
|---|---|
| Lambda Zap | pBluescript (pBS) |
| Uni-Zap XR | pBluescript (pBS) |
| Zap Express | pBK |
| lafmid BA | plafmid BA |
| pSport1 | pSport1 |
| pCMVSport 2.0 | pCMVSport 2.0 |
| pCMVSport 3.0 | pCMVSport 3.0 |
| pCR ®2.1 | pCR ®2.1 |

[0875] Vectors Lambda Zap (U.S. Pat. Nos. 5,128,256 and 5,286,636), Uni-Zap XR (U.S. Pat. Nos. 5,128, 256 and 5,286,636), Zap Express (U.S. Pat. Nos. 5,128,256 and 5,286,636), pBluescript (pBS) (Short, J. M. et al., Nucleic Acids Res. 16:7583-7600 (1988); Alting-Mees, M. A. and Short, J. M., Nucleic Acids Res. 17:9494 (1989)) and pBK (Alting-Mees, M. A. et al., Strategies 5:58-61 (1992)) are commercially available from Stratagene Cloning Systems, Inc., 11011 N. Torrey Pines Road, La Jolla, Calif., 92037. pBS contains an ampicillin resistance gene and pBK contains a neomycin resistance gene. Both can be transformed into E. coli strain XL-1 Blue, also available from Stratagene. pBS comes in 4 forms SK+, SK−, KS+ and KS. The S and K refers to the orientation of the polylinker to the T7 and T3 primer sequences which flank the polylinker region (“S” is for SacI and “K” is for KpnI which are the first sites on each respective end of the linker). “+” or “−” refer to the orientation of the fl origin of replication (“ori”), such that in one orientation, single stranded rescue initiated from the fl ori generates sense strand DNA and in the other, antisense.

[0876] Vectors pSport1, pCMVSport 2.0 and pCMVSport 3.0, were obtained from Life Technologies, Inc., P. 0. Box 6009, Gaithersburg, Md. 20897. All Sport vectors contain an ampicillin resistance gene and may be transformed into E. coli strain DH10B, also available from Life Technologies. (See, for instance, Gruber, C. E., et al., Focus 15:59 (1993)). Vector lafmid BA (Bento Soares, Columbia University, NY) contains an ampicillin resistance gene and can be transformed into E. coli strain XL-1 Blue. Vector pCR®2.1, which is available from Invitrogen, 1600 Faraday Avenue, Carlsbad, Calif. 92008, contains an ampicillin resistance gene and may be transformed into E. coli strain DH10B, available from Life Technologies. (See, for instance, Clark, J. M., Nuc. Acids Res. 16:9677-9686 (1988) and Mead, D. et al., Bio/Technology 9: (1991)). Preferably, a polynucleotide of the present invention does not comprise the phage vector sequences identified for the particular clone in Table 7, as well as the corresponding plasmid vector sequences designated above.

[0877] The deposited material in the sample assigned the ATCC Deposit Number cited by reference to Tables 1, 2, 6 and 7 for any given cDNA clone also may contain one or more additional plasmids, each comprising a cDNA clone different from that given clone. Thus, deposits sharing the same ATCC Deposit Number contain at least a plasmid for each Clone ID NO:Z.

TABLE 7

| | | | ATCC |
|---|---|---|---|
| Libraries owned by Catalog | Catalog Description | Vector | Deposit |
| HUKA HUKB HUKC HUKD HUKE | Human Uterine Cancer | Lambda ZAP II | LP01 |
| HUKF HUKG | | | |
| HCNA HCNB | Human Colon | Lambda Zap II | LP01 |
| HFFA | Human Fetal Brain, random primed | Lambda Zap II | LP01 |
| HTWA | Resting T-Cell | Lambda ZAP II | LP01 |
| HBQA | Early Stage Human Brain, random | Lambda ZAP II | LP01 |
| | primed | | |
| HLMB HLMF HLMG HLMH HLMI | breast lymph node CDNA library | Lambda ZAP II | LP01 |
| HLMJ HLMM HLMN | | | |
| HCQA HCQB | human colon cancer | Lamda ZAP II | LP01 |
| HMEA HMEC HMED HMEE HMEF | Human Microvascular Endothelial | Lambda ZAP II | LP01 |
| HMEG HMEI HMEJ HMEK HMEL | Cells, fract. A | | |
| HUSA HUSC | Human Umbilical Vein Endothelial | Lambda ZAP II | LP01 |
| | Cells, fract. A | | |
| HLQA HLQB | Hepatocellular Tumor | Lambda ZAP II | LP01 |
| HHGA HHGB HHGC HHGD | Hemangiopericytoma | Lambda ZAP II | LP01 |
| HSDM | Human Striatum Depression, re-rescue | Lambda ZAP II | LP01 |
| HUSH | H Umbilical Vein Endothelial Cells, | Lambda ZAP II | LP01 |
| | frac A, re-excision | | |
| HSGS | Salivary gland, subtracted | Lambda ZAP II | LP01 |
| HFXA HFXB HFXC HFXD HFXE | Brain frontal cortex | Lambda ZAP II | LP01 |
| HFXF HFXG HFXH | | | |
| HPQA HPQB HPQC | PERM TF274 | Lambda ZAP II | LP01 |
| HFXJ HFXK | Brain Frontal Cortex, re-excision | Lambda ZAP II | LP01 |
| HCWA HCWB HCWC HCWD HCWE | CD34 positive cells (Cord Blood) | ZAP Express | LP02 |
| HCWF HCWG HCWH HCWI HCWJ | | | |
| HCWK | | | |
| HCUA HCUB HCUC | CD34 depleted Buffy Coat (Cord | ZAP Express | LP02 |
| | Blood) | | |
| HRSM | A-14 cell line | ZAP Express | LP02 |
| HRSA | A1-CELL LINE | ZAP Express | LP02 |
| HCUD HCUE HCUF HCUG HCUH | CD34 depleted Buffy Coat (Cord | ZAP Express | LP02 |
| HCUI | Blood), re-excision | | |
| HBXE HBXF HBXG | H. Whole Brain #2, re-excision | ZAP Express | LP02 |
| HRLM | L8 cell line | ZAP Express | LP02 |
| HBXA HBXB HBXC HBXD | Human Whole Brain #2 - Oligo dT > | ZAP Express | LP02 |
| | 1.5 Kb | | |
| HUDA HUDB HUDC | Testes | ZAP Express | LP02 |
| HHTM HHTN HHTO | H. hypothalamus, frac A, re-excision | ZAP Express | LP02 |
| HHTL | H. hypothalamus, frac A | ZAP Express | LP02 |
| HASA HASD | Human Adult Spleen | Uni-ZAP XR | LP03 |
| HFKC HFKD HFKE HFKF HFKG | Human Fetal Kidney | Uni-ZAP XR | LP03 |
| HE8A HE8B HE8C HE8D HE8E HE8F | Human 8 Week Whole Embryo | Uni-ZAP XR | LP03 |
| HE8M HE8N | | | |
| HGBA HGBD HGBE HGBF HGBG | Human Gall Bladder | Uni-ZAP XR | LP03 |
| HGBH HGBI | | | |
| HLHA HLHB HLHC HLHD HLHE | Human Fetal Lung III | Uni-ZAP XR | LP03 |
| HLHF HLHG HLHH HLHQ | | | |
| HPMA HPMB HPMC HPMD HPME | Human Placenta | Uni-ZAP XR | LP03 |
| HPMF HPMG HPMH | | | |
| HPRA HPRB HPRC HPRD | Human Prostate | Uni-ZAP XR | LP03 |
| HSIA HSIC HSID HSIE | Human Adult Small Intestine | Uni-ZAP XR | LP03 |
| HTEA HTEB HTEC HTED HTEE | Human Testes | Uni-ZAP XR | LP03 |
| HTEF HTEG HTEH HTEI HTEJ HTEK | | | |
| HTPA HTPB HTPC HTPD HTPE | Human Pancreas Tumor | Uni-ZAP XR | LP03 |
| HTTA HTTB HTTC HTTD HTTE HTTF | Human Testes Tumor | Uni-ZAP XR | LP03 |
| HAPA HAPB HAPC HAPM | Human Adult Pulmonary | Uni-ZAP XR | LP03 |
| HETA HETB HETC HETD HETE | Human Endometrial Tumor | Uni-ZAP XR | LP03 |
| HETF HETG HETH HETI | | | |
| HHFB HHFC HHFD HHFE HHFF | Human Fetal Heart | Uni-ZAP XR | LP03 |
| HHFG HHFH HHFI | | | |
| HHPB HHPC HHPD HHPE HHPF | Human Hippocampus | Uni-ZAP XR | LP03 |
| HHPG HHPH | | | |
| HCE1 HCE2 HCE3 HCE4 HCE5 HCEB | Human Cerebellum | Uni-ZAP XR | LP03 |
| HCEC HCED HCEE HCEF HCEG | | | |
| HUVB HUVC HUVD HUVE | Human Umbilical Vein, Endo. remake | Uni-ZAP XR | LP03 |
| HSTA HSTB HSTC HSTD | Human Skin Tumor | Uni-ZAP XR | LP03 |
| HTAA HTAB HTAC HTAD HTAE | Human Activated T-Cells | Uni-ZAP XR | LP03 |
| HFEA HFEB HFEC | Human Fetal Epithelium (Skin) | Uni-ZAP XR | LP03 |
| HJPA HJPB HJPC HJPD | HUMAN JURKAT MEMBRANE | Uni-ZAP XR | LP03 |
| | BOUND POLYSOMES | | |
| HESA | Human epithelioid sarcoma | Uni-Zap XR | LP03 |
| HLTA HLTB HLTC HLTD HLTE HLTF | Human T-Cell Lymphoma | Uni-ZAP XR | LP03 |
| HFTA HFTB HFTC HFTD | Human Fetal Dura Mater | Uni-ZAP XR | LP03 |
| HRDA HRDB HRDC HRDD HRDE | Human Rhabdomyosarcoma | Uni-ZAP XR | LP03 |
| HRDF | | | |
| HCAA HCAB HCAC | Cem cells cyclohexamide treated | Uni-ZAP XR | LP03 |
| HRGA HRGB HRGC HRGD | Raji Cells, cyclohexamide treated | Uni-ZAP XR | LP03 |
| HSUA HSUB HSUC HSUM | Supt Cells, cyclohexamide treated | Uni-ZAP XR | LP03 |
| HT4A HT4C HT4D | Activated T-Cells, 12 hrs. | Uni-ZAP XR | LP03 |
| HE9A HE9B HE9C HE9D HE9E HE9F | Nine Week Old Early Stage Human | Uni-ZAP XR | LP03 |
| HE9G HE9H HE9M HE9N | | | |
| HATA HATB HATC HATD HATE | Human Adrenal Gland Tumor | Uni-ZAP XR | LP03 |
| HT5A | Activated T-Cells, 24 hrs. | Uni-ZAP XR | LP03 |
| HFGA HFGM | Human Fetal Brain | Uni-ZAP XR | LP03 |
| HNEA HNEB HNEC HNED HNEE | Human Neutrophil | Uni-ZAP XR | LP03 |
| HBGB HBGD | Human Primary Breast Cancer | Uni-ZAP XR | LP03 |
| HBNA HBNB | Human Normal Breast | Uni-ZAP XR | LP03 |
| HCAS | Cem Cells, cyclohexamide treated, | Uni-ZAP XR | LP03 |
| | subtra | | |
| HHPS | Human Hippocampus, subtracted | pBS | LP03 |
| HKCS HKCU | Human Colon Cancer, subtracted | pBS | LP03 |
| HRGS | Raji cells, cyclohexamide treated, | pBS | LP03 |
| | subtracted | | |
| HSUT | Supt cells, cyclohexamide treated, | pBS | LP03 |
| | differentially expressed | | |
| HT4S | Activated T-Cells, 12 hrs, subtracted | Uni-ZAP XR | LP03 |
| HCDA HCDB HCDC HCDD HCDE | Human Chondrosarcoma | Uni-ZAP XR | LP03 |
| HOAA HOAB HOAC | Human Osteosarcoma | Uni-ZAP XR | LP03 |
| HTLA HTLB HTLC HTLD HTLE | Human adult testis, large inserts | Uni-ZAP XR | LP03 |
| HTLF | | | |
| HLMA HLMC HLMD | Breast Lymph node cDNA library | Uni-ZAP XR | LP03 |
| H6EA H6EB H6EC | HL-60, PMA 4 H | Uni-ZAP XR | LP03 |
| HTXA HTXB HTXC HTXD HTXE | Activated T-Cell (12hs)/Thiouridine | Uni-ZAP XR | LP03 |
| HTXF HTXG HTXH | labelledEco | | |
| HNFA HNFB HNFC HNFD HNFE | Human Neutrophil, Activated | Uni-ZAP XR | LP03 |
| HNFF HNFG HNFH HNFJ | | | |
| HTOB HTOC | HUMAN TONSILS, FRACTION 2 | Uni-ZAP XR | LP03 |
| HMGB | Human OB MG63 control fraction I | Uni-ZAP XR | LP03 |
| HOPB | Human OB HOS control fraction I | Uni-ZAP XR | LP03 |
| HORB | Human OB HOS treated (10 nM E2) | Uni-ZAP XR | LP03 |
| | fraction I | | |
| HSVA HSVB HSVC | Human Chronic Synovitis | Uni-ZAP XR | LP03 |
| HROA | HUMAN STOMACH | Uni-ZAP XR | LP03 |
| HBJA HBJB HBJC HBJD HBJE HBJF | HUMAN B CELL LYMPHOMA | Uni-ZAP XR | LP03 |
| HBJG HBJH HBJI HBJJ HBJK | | | |
| HCRA HCRB HCRC | human corpus colosum | Uni-ZAP XR | LP03 |
| HODA HODB HODC HODD | human ovarian cancer | Uni-ZAP XR | LP03 |
| HDSA | Dermatofibrosarcoma Protuberance | Uni-ZAP XR | LP03 |
| HMWA HMWB HMWC HMWD | Bone Marrow Cell Line (RS4, 11) | Uni-ZAP XR | LP03 |
| HMWE HMWF HMWG HMWH | | | |
| HMWI HMWJ | | | |
| HSOA | stomach cancer (human) | Uni-ZAP XR | LP03 |
| HERA | SKIN | Uni-ZAP XR | LP03 |
| HMDA | Brain-medulloblastoma | Uni-ZAP XR | LP03 |
| HGLA HGLB HGLD | Glioblastoma | Uni-ZAP XR | LP03 |
| HEAA | H. Atrophic Endometrium | Uni-ZAP XR | LP03 |
| HBCA HBCB | H. Lymph node breast Cancer | Uni-ZAP XR | LP03 |
| HPWT | Human Prostate BPH, re-excision | Uni-ZAP XR | LP03 |
| HFVG HFVH HFVI | Fetal Liver, subtraction II | pBS | LP03 |
| HNFI | Human Neutrophils, Activated, re- | pBS | LP03 |
| | excision | | |
| HBMB HBMC HBMD | Human Bone Marrow, re-excision | pBS | LP03 |
| HKML HKMM HKMN | H. Kidney Medulla, re-excision | pBS | LP03 |
| HKIX HKIY | H. Kidney Cortex, subtracted | pBS | LP03 |
| HADT | H. Amygdala Depression, subtracted | pBS | LP03 |
| H6AS | Hl-60, untreated, subtracted | Uni-ZAP XR | LP03 |
| H6ES | HL-60, PMA 4 H, subtracted | Uni-ZAP XR | LP03 |
| H6BS | HL-60, RA 4 h, Subtracted | Uni-ZAP XR | LP03 |
| H6CS | HL-60, PMA 1 d, subtracted | Uni-ZAP XR | LP03 |
| HTXJ HTXK | Activated T-cell(12 h)/Thiouridine-re- | Uni-ZAP XR | LP03 |
| | excision | | |
| HMSA HMSB HMSC HMSD HMSE | Monocyte activated | Uni-ZAP XR | LP03 |
| HMSF HMSG HMSH HMSI HMSJ | | | |
| HMSK | | | |
| HAGA HAGB HAGC HAGD HAGE | Human Amygdala | Uni-ZAP XR | LP03 |
| HAGF | | | |
| HSRA HSRB HSRE | STROMAL-OSTEOCLASTOMA | Uni-ZAP XR | LP03 |
| HSRD HSRF HSRG HSRH | Human Osteoclastoma Stromal Cells - | Uni-ZAP XR | LP03 |
| | unamplified | | |
| HSQA HSQB HSQC HSQD HSQE | Stromal cell TF274 | Uni-ZAP XR | LP03 |
| HSQF HSQG | | | |
| HSKA HSKB HSKC HSKD HSKE | Smooth muscle, serum treated | Uni-ZAP XR | LP03 |
| HSKF HSKZ | | | |
| HSLA HSLB HSLC HSLD HSLE | Smooth muscle, control | Uni-ZAP XR | LP03 |
| HSLF HSLG | | | |
| HSDA HSDD HSDE HSDF HSDG | Spinal cord | Uni-ZAP XR | LP03 |
| HSDH | | | |
| HPWS | Prostate-BPH subtracted II | pBS | LP03 |
| HSKW HSKX HSKY | Smooth Muscle- HASTE normalized | pBS | LP03 |
| HFPB HFPC HFPD | H. Frontal cortex, epileptic; re-excision | Uni-ZAP XR | LP03 |
| HSDI HSDJ HSDK | Spinal Cord, re-excision | Uni-ZAP XR | LP03 |
| HSKN HSKO | Smooth Muscle Serum Treated, Norm | pBS | LP03 |
| HSKG HSKH HSKI | Smooth muscle, serum induced, re-exc | pBS | LP03 |
| HFCA HFCB HFCC HFCD HFCE | Human Fetal Brain | Uni-ZAP XR | LP04 |
| HFCF | | | |
| HPTA HPTB HPTD | Human Pituitary | Uni-ZAP XR | LP04 |
| HTHB HTHC HTHD | Human Thymus | Uni-ZAP XR | LP04 |
| HE6B HE6C HE6D HE6E HE6F HE6G | Human Whole Six Week Old Embryo | Uni-ZAP XR | LP04 |
| HE6S | | | |
| HSSA HSSB HSSC HSSD HSSE HSSF | Human Synovial Sarcoma | Uni-ZAP XR | LP04 |
| HSSG HSSH HSSI HSSJ HSSK | | | |
| HE7T | 7 Week Old Early Stage Human, | Uni-ZAP XR | LP04 |
| | subtracted | | |
| HEPA HEPB HEPC | Human Epididymus | Uni-ZAP XR | LP04 |
| HSNA HSNB HSNC HSNM HSNN | Human Synovium | Uni-ZAP XR | LP04 |
| HPFB HPFC HPFD HPFE | Human Prostate Cancer, Stage C | Uni-ZAP XR | LP04 |
| | fraction | | |
| HE2A HE2D HE2E HE2H HE2I HE2M | 12 Week Old Early Stage Human | Uni-ZAP XR | LP04 |
| HE2N HE2O | | | |
| HE2B HE2C HE2F HE2G HE2P HE2Q | 12 Week Old Early Stage Human, II | Uni-ZAP XR | LP04 |
| HPTS HPTT HPTU | Human Pituitary, subtracted | Uni-ZAP XR | LP04 |
| HAUA HAUB HAUC | Amniotic Cells - TNF induced | Uni-ZAP XR | LP04 |
| HAQA HAQB HAQC HAQD | Amniotic Cells - Primary Culture | Uni-ZAP XR | LP04 |
| HWTA HWTB HWTC | wilm's tumor | Uni-ZAP XR | LP04 |
| HBSD | Bone Cancer, re-excision | Uni-ZAP XR | LP04 |
| HSGB | Salivary gland, re-excision | Uni-ZAP XR | LP04 |
| HSJA HSJB HSJC | Smooth muscle-ILb induced | Uni-ZAP XR | LP04 |
| HSXA HSXB HSXC HSXD | Human Substantia Nigra | Uni-ZAP XR | LP04 |
| HSHA HSHB HSHC | Smooth muscle, IL1b induced | Uni-ZAP XR | LP04 |
| HOUA HOUB HOUC HOUD HOUE | Adipocytes | Uni-ZAP XR | LP04 |
| HPWA HPWB HPWC HPWD HPWE | Prostate BPH | Uni-ZAP XR | LP04 |
| HELA HELB HELC HELD HELE | Endothelial cells-control | Uni-ZAP XR | LP04 |
| HELF HELG HELH | | | |
| HEMA HEMB HEMC HEMD HEME | Endothelial-induced | Uni-ZAP XR | LP04 |
| HEMF HEMG HEMH | | | |
| HBIA HBIB HBIC | Human Brain, Striatum | Uni-ZAP XR | LP04 |
| HHSA HHSB HHSC HHSD HHSE | Human Hypothalmus, Schizophrenia | Uni-ZAP XR | LP04 |
| HNGA HNGB HNGC HNGD HNGE | neutrophils control | Uni-ZAP XR | LP04 |
| HNGF HNGG HNGH HNGI HNGJ | | | |
| HNHA HNHB HNHC HNHD HNHE | Neutrophils IL-1 and LPS induced | Uni-ZAP XR | LP04 |
| HNHF HNHG HNHH HNHI HNHJ | | | |
| HSDB HSDC | STRIATUM DEPRESSION | Uni-ZAP XR | LP04 |
| HHPT | Hypothalamus | Uni-ZAP XR | LP04 |
| HSAT HSAU HSAV HSAW HSAX | Anergic T-cell | Uni-ZAP XR | LP04 |
| HSAY HSAZ | | | |
| HBMS HBMT HBMU HBMV HBMW | Bone marrow | Uni-ZAP XR | LP04 |
| HBMX | | | |
| HOEA HOEB HOEC HOED HOEE | Osteoblasts | Uni-ZAP XR | LP04 |
| HOEF HOEJ | | | |
| HAIA HAIB HAIC HAID HAIE HAIF | Epithelial-TNFa and INF induced | Uni-ZAP XR | LP04 |
| HTGA HTGB HTGC HTGD | Apoptotic T-cell | Uni-ZAP XR | LP04 |
| HMCA HMCB HMCC HMCD HMCE | Macrophage-oxLDL | Uni-ZAP XR | LP04 |
| HMAA HMAB HMAC HMAD HMAE | Macrophage (GM-CSF treated) | Uni-ZAP XR | LP04 |
| HMAF HMAG | | | |
| HPHA | Normal Prostate | Uni-ZAP XR | LP04 |
| HPIA HPIB HPIC | LNCAP prostate cell line | Uni-ZAP XR | LP04 |
| HPJA HPJB HPJC | PC3 Prostate cell line | Uni-ZAP XR | LP04 |
| HOSE HOSF HOSG | Human Osteoclastoma, re-excision | Uni-ZAP XR | LP04 |
| HTGE HTGF | Apoptotic T-cell, re-excision | Uni-ZAP XR | LP04 |
| HMAJ HMAK | H Macrophage (GM-CSF treated), re- | Uni-ZAP XR | LP04 |
| | excision | | |
| HACB HACC HACD | Human Adipose Tissue, re-excision | Uni-ZAP XR | LP04 |
| HFPA | H. Frontal Cortex, Epileptic | Uni-ZAP XR | LP04 |
| HFAA HFAB HFAC HFAD HFAE | Alzheimer's, spongy change | Uni-ZAP XR | LP04 |
| HFAM | Frontal Lobe, Dementia | Uni-ZAP XR | LP04 |
| HMIA HMIB HMIC | Human Manic Depression Tissue | Uni-ZAP XR | LP04 |
| HTSA HTSE HTSF HTSG HTSH | Human Thymus | pBS | LP05 |
| HPBA HPBB HPBC HPBD HPBE | Human Pineal Gland | pBS | LP05 |
| HSAA HSAB HSAC | HSA 172 Cells | pBS | LP05 |
| HSBA HSBB HSBC HSBM | HSC172 cells | pBS | LP05 |
| HJAA HJAB HJAC HJAD | Jurkat T-cell G1 phase | pBS | LP05 |
| HJBA HJBB HJBC HJBD | Jurkat T-Cell, S phase | pBS | LP05 |
| HAFA HAFB | Aorta endothelial cells + TNF-a | pBS | LP05 |
| HAWA HAWB HAWC | Human White Adipose | pBS | LP05 |
| HTNA HTNB | Human Thyroid | pBS | LP05 |
| HONA | Normal Ovary, Premenopausal | pBS | LP05 |
| HARA HARB | Human Adult Retina | pBS | LP05 |
| HLJA HLJB | Human Lung | pCMVSport 1 | LP06 |
| HOFM HOFN HOFO | H. Ovarian Tumor, II, OV5232 | pCMVSport 2.0 | LP07 |
| HOGA HOGB HOGC | OV Oct. 3, 1995 | pCMVSport 2.0 | LP07 |
| HCGL | CD34 + cells, II | pCMVSport 2.0 | LP07 |
| HDLA | Hodgkin's Lymphoma I | pCMVSport 2.0 | LP07 |
| HDTA HDTB HDTC HDTD HDTE | Hodgkin's Lymphoma II | pCMVSport 2.0 | LP07 |
| HKAA HKAB HKAC HKAD HKAE | Keratinocyte | pCMVSport2.0 | LP07 |
| HKAF HKAG HKAH | | | |
| HCIM | CAPFINDER, Crohn's Disease, lib 2 | pCMVSport 2.0 | LP07 |
| HKAL | Keratinocyte, lib 2 | pCMVSport2.0 | LP07 |
| HKAT | Keratinocyte, lib 3 | pCMVSport2.0 | LP07 |
| HNDA | Nasal polyps | pCMVSport2.0 | LP07 |
| HDRA | H. Primary Dendritic Cells, lib 3 | pCMVSport2.0 | LP07 |
| HOHA HOHB HOHC | Human Osteoblasts II | pCMVSport2.0 | LP07 |
| HLDA HLDB HLDC | Liver, Hepatoma | pCMVSport3.0 | LP08 |
| HLDN HLDO HLDP | Human Liver, normal | pCMVSport3.0 | LP08 |
| HMTA | pBMC stimulated w/ poly I/C | pCMVSport3.0 | LP08 |
| HNTA | NTERA2, control | pCMVSport3.0 | LP08 |
| HDPA HDPB HDPC HDPD HDPF | Primary Dendritic Cells, lib 1 | pCMVSport3.0 | LP08 |
| HDPG HDPH HDPI HDPJ HDPK | | | |
| HDPM HDPN HDPO HDPP | Primary Dendritic cells, frac 2 | pCMVSport3.0 | LP08 |
| HMUA HMUB HMUC | Myoloid Progenitor Cell Line | pCMVSport3.0 | LP08 |
| HHEA HHEB HHEC HHED | T Cell helper I | pCMVSport3.0 | LP08 |
| HHEM HHEN HHEO HHEP | T cell helper II | pCMVSport3.0 | LP08 |
| HEQA HEQB HEQC | Human endometrial stromal cells | pCMVSport3.0 | LP08 |
| HJMA HJMB | Human endometrial stromal cells- | pCMVSport3.0 | LP08 |
| | treated with progesterone | | |
| HSWA HSWB HSWC | Human endometrial stromal cells- | pCMVSport3.0 | LP08 |
| | treated with estradiol | | |
| HSYA HSYB HSYC | Human Thymus Stromal Cells | pCMVSport3.0 | LP08 |
| HLWA HLWB HLWC | Human Placenta | pCMVSport3.0 | LP08 |
| HRAA HRAB HRAC | Rejected Kidney, lib 4 | pCMVSport3.0 | LP08 |
| HMTM | PCR, pBMC I/C treated | PCRII | LP09 |
| HMJA | H. Meniingima, M6 | pSport 1 | LP10 |
| HMKA HMKB HMKC HMKD HMKE | H. Meningima, M1 | pSport 1 | LP10 |
| HUSG HUSI | Human umbilical vein endothelial cells, | pSport 1 | LP10 |
| | IL-4 induced | | |
| HUSX HUSY | Human Umbilical Vein Endothelial | pSport 1 | LP10 |
| | Cells, uninduced | | |
| HOFA | Ovarian Tumor I, OV5232 | pSport 1 | LP10 |
| HCFA HCFB HCFC HCFD | T-Cell PHA 16 hrs | pSport 1 | LP10 |
| HCFL HCFM HCFN HCFO | T-Cell PHA 24 hrs | pSport 1 | LP10 |
| HADA HADC HADD HADE HADF | Human Adipose | pSport 1 | LP10 |
| HADG | | | |
| HOVA HOVB HOVC | Human Ovary | pSport 1 | LP10 |
| HTWB HTWC HTWD HTWE HTWF | Resting T-Cell Library, II | pSport 1 | LP10 |
| HMMA | Spleen metastic melanoma | pSport 1 | LP10 |
| HLYA HLYB HLYC HLYD HLYE | Spleen, Chronic lymphocytic leukemia | pSport 1 | LP10 |
| HCGA | CD34 + cell, I | pSport 1 | LP10 |
| HEOM HEON | Human Eosinophils | pSport 1 | LP10 |
| HTDA | Human Tonsil, Lib 3 | pSport 1 | LP10 |
| HSPA | Salivary Gland, Lib 2 | pSport 1 | LP10 |
| HCHA HCHB HCHC | Breast Cancer cell line, MDA 36 | pSport 1 | LP10 |
| HCHM HCHN | Breast Cancer Cell line, angiogenic | pSport 1 | LP10 |
| HCIA | Crohn's Disease | pSport 1 | LP10 |
| HDAA HDAB HDAC | HEL cell line | pSport 1 | LP10 |
| HABA | Human Astrocyte | pSport 1 | LP10 |
| HUFA HUFB HUFC | Ulcerative Colitis | pSport 1 | LP10 |
| HNTM | NTERA2 + retinoic acid, 14 days | pSport 1 | LP10 |
| HDQA | Primary Dendritic cells, CapFinder2, | pSport 1 | LP10 |
| | frac 1 | | |
| HDQM | Primary Dendritic Cells, CapFinder, | pSport 1 | LP10 |
| | frac 2 | | |
| HLDX | Human Liver, normal, CapFinder | pSport 1 | LP10 |
| HULA HULB HULC | Human Dermal Endothelial | pSport1 | LP10 |
| | Cells, untreated | | |
| HUMA | Human Dermal Endothelial cells, treated | pSport1 | LP10 |
| HCJA | Human Stromal Endometrial | pSport1 | LP10 |
| | fibroblasts, untreated | | |
| HCJM | Human Stromal endometrial fibroblasts, | pSport1 | LP10 |
| | treated w/ estradiol | | |
| HEDA | Human Stromal endometrial fibroblasts, | pSport1 | LP10 |
| | treated with progesterone | | |
| HFNA | Human ovary tumor cell OV350721 | pSport1 | LP10 |
| HKGA HKGB HKGC HKGD | Merkel Cells | pSport1 | LP10 |
| HISA HISB HISC | Pancreas Islet Cell Tumor | pSport1 | LP10 |
| HLSA | Skin, burned | pSport1 | LP10 |
| HBZA | Prostate, BPH, Lib 2 | pSport 1 | LP10 |
| HBZS | Prostate BPH, Lib 2, subtracted | pSport 1 | LP10 |
| HFIA HFIB HFIC | Synovial Fibroblasts (control) | pSport 1 | LP10 |
| HFIH HFII HFIJ | Synovial hypoxia | pSport 1 | LP10 |
| HFIT HFIU HFIV | Synovial IL-1/TNF stimulated | pSport 1 | LP10 |
| HGCA | Messangial cell, frac 1 | pSport1 | LP10 |
| HMVA HMVB HMVC | Bone Marrow Stromal Cell, untreated | pSport1 | LP10 |
| HFIX HFIY HFIZ | Synovial Fibroblasts (Il1/TNF), subt | pSport1 | LP10 |
| HFOX HFOY HFOZ | Synovial hypoxia-RSF subtracted | pSport1 | LP10 |
| HMQA HMQB HMQC HMQD | Human Activated Monocytes | Uni-ZAP XR | LP11 |
| HLIA HLIB HLIC | Human Liver | pCMVSport 1 | LP012 |
| HHBA HHBB HHBC HHBD HHBE | Human Heart | pCMVSport 1 | LP012 |
| HBBA HBBB | Human Brain | pCMVSport 1 | LP012 |
| HLJA HLJB HLJC HLJD HLJE | Human Lung | pCMVSport 1 | LP012 |
| HOGA HOGB HOGC | Ovarian Tumor | pCMVSport 2.0 | LP012 |
| HTJM | Human Tonsils, Lib 2 | pCMVSport 2.0 | LP012 |
| HAMF HAMG | KMH2 | pCMVSport 3.0 | LP012 |
| HAJA HAJB HAJC | L428 | pCMVSport 3.0 | LP012 |
| HWBA HWBB HWBC HWBD HWBE | Dendritic cells, pooled | pCMVSport 3.0 | LP012 |
| HWAA HWAB HWAC HWAD HWAE | Human Bone Marrow, treated | pCMVSport 3.0 | LP012 |
| HYAA HYAB HYAC | B Cell lymphoma | pCMVSport 3.0 | LP012 |
| HWHG HWHH HWHI | Healing groin wound, 6.5 hours post | pCMVSport 3.0 | LP012 |
| | incision | | |
| HWHP HWHQ HWHR | Healing groin wound; 7.5 hours post | pCMVSport 3.0 | LP012 |
| | incision | | |
| HARM | Healing groin wound - zero hr post- | pCMVSport 3.0 | LP012 |
| | incision (control) | | |
| HBIM | Olfactory epithelium, nasalcavity | pCMVSport 3.0 | LP012 |
| HWDA | Healing Abdomen wound, 70&90 min | pCMVSport 3.0 | LP012 |
| | post incision | | |
| HWEA | Healing Abdomen Wound; 15 days post | pCMVSport 3.0 | LP012 |
| | incision | | |
| HWJA | Healing Abdomen Wound, 21&29 days | pCMVSport 3.0 | LP012 |
| HNAL | Human Tongue, frac 2 | pSport1 | LP012 |
| HMJA | H. Meniingima, M6 | pSport1 | LP012 |
| HMKA HMKB HMKC HMKD HMKE | H. Meningima, M1 | pSport1 | LP012 |
| HOFA | Ovarian Tumor I, OV5232 | pSport1 | LP012 |
| HCFA HCFB HCFC HCFD | T-Cell PHA 16 hrs | pSport1 | LP012 |
| HCFL HCFM HCFN HCFO | T-Cell PHA 24 hrs | pSport1 | LP012 |
| HMMA HMMB HMMC | Spleen metastic melanoma | pSport1 | LP012 |
| HTDA | Human Tonsil, Lib 3 | pSport1 | LP012 |
| HDBA | Human Fetal Thymus | pSport1 | LP012 |
| HDUA | Pericardium | pSport1 | LP012 |
| HBZA | Prostate, BPH, Lib 2 | pSport1 | LP012 |
| HWCA | Larynx tumor | pSport1 | LP012 |
| HWKA | Normal lung | pSport1 | LP012 |
| HSMB | Bone marrow stroma, treated | pSport1 | LP012 |
| HBHM | Normal trachea | pSport1 | LP012 |
| HLFC | Human Larynx | pSport1 | LP012 |
| HLRB | Siebben Polyposis | pSport1 | LP012 |
| HNIA | Mammary Gland | pSport1 | LP012 |
| HNJB | Palate carcinoma | pSport1 | LP012 |
| HNKA | Palate normal | pSport1 | LP012 |
| HMZA | Pharynx carcinoma | pSport1 | LP012 |
| HABG | Cheek Carcinoma | pSport1 | LP012 |
| HMZM | Pharynx Carcinoma | pSport1 | LP012 |
| HDRM | Larynx Carcinoma | pSport1 | LP012 |
| HVAA | Pancreas normal PCA4 No | pSport1 | LP012 |
| HICA | Tongue carcinoma | pSport1 | LP012 |
| HUKA HUKB HUKC HUKD HUKE | Human Uterine Cancer | Lambda ZAP II | LP013 |
| HFFA | Human Fetal Brain, random primed | Lambda ZAP II | LP013 |
| HTUA | Activated T-cell labeled with 4-thioluri | Lambda ZAP II | LP013 |
| HBQA | Early Stage Human Brain, random | Lambda ZAP II | LP013 |
| | primed | | |
| HMEB | Human microvascular Endothelial cells, | Lambda ZAP II | LP013 |
| | fract. B | | |
| HUSH | Human Umbilical Vein Endothelial | Lambda ZAP II | LP013 |
| | cells, fract. A, re-excision | | |
| HLQC HLQD | Hepatocellular tumor, re-excision | Lambda ZAP II | LP013 |
| HTWJ HTWK HTWL | Resting T-cell, re-excision | Lambda ZAP II | LP013 |
| HF6S | Human Whole 6 week Old Embryo (II), | pBluescript | LP013 |
| | subt | | |
| HHPS | Human Hippocampus, subtracted | pBluescript | LP013 |
| HLIS | LNCAP, differential expression | pBluescript | LP013 |
| HLHS HLHT | Early Stage Human Lung, Subtracted | pBluescript | LP013 |
| HSUS | Supt cells, cyclohexamide treated, | pBluescript | LP013 |
| | subtracted | | |
| HSUT | Supt cells, cyclohexamide treated, | pBluescript | LP013 |
| | differentially expressed | | |
| HSDS | H. Striatum Depression, subtracted | pBluescript | LP013 |
| HPTZ | Human Pituitary, Subtracted VII | pBluescript | LP013 |
| HSDX | H. Striatum Depression, subt II | pBluescript | LP013 |
| HSDZ | H. Striatum Depression, subt | pBluescript | LP013 |
| HPBA HPBB HPBC HPBD HPBE | Human Pineal Gland | pBluescript SK- | LP013 |
| HRTA | Colorectal Tumor | pBluescript SK- | LP013 |
| HSBA HSBB HSBC HSBM | HSC172 cells | pBluescript SK- | LP013 |
| HJAA HJAB HJAC HJAD | Jurkat T-cell G1 phase | pBluescript SK- | LP013 |
| HJBA HJBB HJBC HJBD | Jurkat T-cell, S1 phase | pBluescript SK- | LP013 |
| HTNA HTNB | Human Thyroid | pBluescript SK- | LP013 |
| HAHA HAHB | Human Adult Heart | Uni-ZAP XR | LP013 |
| HE6A | Whole 6 week Old Embryo | Uni-ZAP XR | LP013 |
| HFCA HFCB HFCC HFCD HFCE | Human Fetal Brain | Uni-ZAP XR | LP013 |
| HFKC HFKD HFKE HFKF HFKG | Human Fetal Kidney | Uni-ZAP XR | LP013 |
| HGBA HGBD HGBE HGBF HGBG | Human Gall Bladder | Uni-ZAP XR | LP013 |
| HPRA HPRB HPRC HPRD | Human Prostate | Uni-ZAP XR | LP013 |
| HTEA HTEB HTEC HTED HTEE | Human Testes | Uni-ZAP XR | LP013 |
| HTTA HTTB HTTC HTTD HTTE | Human Testes Tumor | Uni-ZAP XR | LP013 |
| HYBA HYBB | Human Fetal Bone | Uni-ZAP XR | LP013 |
| HFLA | Human Fetal Liver | Uni-ZAP XR | LP013 |
| HHFB HHFC HHFD HHFE HHFF | Human Fetal Heart | Uni-ZAP XR | LP013 |
| HUVB HUVC HUVD HUVE | Human Umbilical Vein, End. remake | Uni-ZAP XR | LP013 |
| HTHB HTHC HTHD | Human Thymus | Uni-ZAP XR | LP013 |
| HSTA HSTB HSTC HSTD | Human Skin Tumor | Uni-ZAP XR | LP013 |
| HTAA HTAB HTAC HTAD HTAE | Human Activated T-cells | Uni-ZAP XR | LP013 |
| HFEA HFEB HFEC | Human Fetal Epithelium (skin) | Uni-ZAP XR | LP013 |
| HJPA HJPB HJPC HJPD | Human Jurkat Membrane Bound | Uni-ZAP XR | LP013 |
| | Polysomes | | |
| HESA | Human Epithelioid Sarcoma | Uni-ZAP XR | LP013 |
| HALS | Human Adult Liver, Subtracted | Uni-ZAP XR | LP013 |
| HFTA HFTB HFTC HFTD | Human Fetal Dura Mater | Uni-ZAP XR | LP013 |
| HCAA HCAB HCAC | Cem cells, cyclohexamide treated | Uni-ZAP XR | LP013 |
| HRGA HRGB HRGC HRGD | Raji Cells, cyclohexamide treated | Uni-ZAP XR | LP013 |
| HE9A HE9B HE9C HE9D HE9E | Nine Week Old Early Stage Human | Uni-ZAP XR | LP013 |
| HSFA | Human Fibrosarcoma | Uni-ZAP XR | LP013 |
| HATA HATB HATC HATD HATE | Human Adrenal Gland Tumor | Uni-ZAP XR | LP013 |
| HTRA | Human Trachea Tumor | Uni-ZAP XR | LP013 |
| HE2A HE2D HE2E HE2H HE2I | 12 Week Old Early Stage Human | Uni-ZAP XR | LP013 |
| HE2B HE2C HE2F HE2G HE2P | 12 Week Old Early Stage Human, II | Uni-ZAP XR | LP013 |
| HNEA HNEB HNEC HNED HNEE | Human Neutrophil | Uni-ZAP XR | LP013 |
| HBGA | Human Primary Breast Cancer | Uni-ZAP XR | LP013 |
| HPTS HPTT HPTU | Human Pituitary, subtracted | Uni-ZAP XR | LP013 |
| HMQA HMQB HMQC HMQD | Human Activated Monocytes | Uni-ZAP XR | LP013 |
| HOAA HOAB HOAC | Human Osteosarcoma | Uni-ZAP XR | LP013 |
| HTOA HTOD HTOE HTOF HTOG | human tonsils | Uni-ZAP XR | LP013 |
| HMGB | Human OB MG63 control fraction I | Uni-ZAP XR | LP013 |
| HOPB | Human OB HOS control fraction I | Uni-ZAP XR | LP013 |
| HOQB | Human OB HOS treated (1 nM E2) | Uni-ZAP XR | LP013 |
| | fraction I | | |
| HAUA HAUB HAUC | Amniotic Cells - TNF induced | Uni-ZAP XR | LP013 |
| HAQA HAQB HAQC HAQD | Amniotic Cells - Primary Culture | Uni-ZAP XR | LP013 |
| HROA HROC | HUMAN STOMACH | Uni-ZAP XR | LP013 |
| HBJA HBJB HBJC HBJD HBJE | HUMAN B CELL LYMPHOMA | Uni-ZAP XR | LP013 |
| HODA HODB HODC HODD | human ovarian cancer | Uni-ZAP XR | LP013 |
| HCPA | Corpus Callosum | Uni-ZAP XR | LP013 |
| HSOA | stomach cancer (human) | Uni-ZAP XR | LP013 |
| HERA | SKIN | Uni-ZAP XR | LP013 |
| HMDA | Brain-medulloblastoma | Uni-ZAP XR | LP013 |
| HGLA HGLB HGLD | Glioblastoma | Uni-ZAP XR | LP013 |
| HWTA HWTB HWTC | wilm's tumor | Uni-ZAP XR | LP013 |
| HEAA | H. Atrophic Endometrium | Uni-ZAP XR | LP013 |
| HAPN HAPO HAPP HAPQ HAPR | Human Adult Pulmonary; re-excision | Uni-ZAP XR | LP013 |
| HLTG HLTH | Human T-cell lymphoma, re-excision | Uni-ZAP XR | LP013 |
| HAHC HAHD HAHE | Human Adult Heart, re-excision | Uni-ZAP XR | LP013 |
| HAGA HAGB HAGC HAGD HAGE | Human Amygdala | Uni-ZAP XR | LP013 |
| HSJA HSJB HSJC | Smooth muscle-ILb induced | Uni-ZAP XR | LP013 |
| HSHA HSHB HSHC | Smooth muscle, IL1b induced | Uni-ZAP XR | LP013 |
| HPWA HPWB HPWC HPWD HPWE | Prostate BPH | Uni-ZAP XR | LP013 |
| HPIA HPIB HPIC | LNCAP prostate cell line | Uni-ZAP XR | LP013 |
| HPJA HPJB HPJC | PC3 Prostate cell line | Uni-ZAP XR | LP013 |
| HBTA | Bone Marrow Stroma, TNF&LPS ind | Uni-ZAP XR | LP013 |
| HMCF HMCG HMCH HMCI HMCJ | Macrophage-oxLDL, re-excision | Uni-ZAP XR | LP013 |
| HAGG HAGH HAGI | Human Amygdala, re-excision | Uni-ZAP XR | LP013 |
| HACA | H. Adipose Tissue | Uni-ZAP XR | LP013 |
| HKFB | K562 + PMA (36 hrs), re-excision | ZAP Express | LP013 |
| HCWT HCWU HCWV | CD34 positive cells (cord blood), re-ex | ZAP Express | LP013 |
| HBWA | Whole brain | ZAP Express | LP013 |
| HBXA HBXB HBXC HBXD | Human Whole Brain #2 - Oligo dT > | ZAP Express | LP013 |
| | 1.5 Kb | | |
| HAVM | Temporal cortex-Alzheizmer | pT-Adv | LP014 |
| HAVT | Hippocampus, Alzheimer Subtracted | pT-Adv | LP014 |
| HHAS | CHME Cell Line | Uni-ZAP XR | LP014 |
| HAJR | Larynx normal | pSport 1 | LP014 |
| HWLE HWLF HWLG HWLH | Colon Normal | pSport 1 | LP014 |
| HCRM HCRN HCRO | Colon Carcinoma | pSport 1 | LP014 |
| HWLI HWLJ HWLK | Colon Normal | pSport 1 | LP014 |
| HWLQ HWLR HWLS HWLT | Colon Tumor | pSport 1 | LP014 |
| HBFM | Gastrocnemius Muscle | pSport 1 | LP014 |
| HBOD HBOE | Quadriceps Muscle | pSport 1 | LP014 |
| HBKD HBKE | Soleus Muscle | pSport 1 | LP014 |
| HCCM | Pancreatic Langerhans | pSport 1 | LP014 |
| HWGA | Larynx carcinoma | pSport 1 | LP014 |
| HWGM HWGN | Larynx carcinoma | pSport 1 | LP014 |
| HWLA HWLB HWLC | Normal colon | pSport 1 | LP014 |
| HWLM HWLN | Colon Tumor | pSport 1 | LP014 |
| HVAM HVAN HVAO | Pancreas Tumor | pSport 1 | LP014 |
| HWGQ | Larynx carcinoma | pSport 1 | LP014 |
| HAQM HAQN | Salivary Gland | pSport 1 | LP014 |
| HASM | Stomach, normal | pSport 1 | LP014 |
| HBCM | Uterus; normal | pSport 1 | LP014 |
| HCDM | Testis; normal | pSport 1 | LP014 |
| HDJM | Brain; normal | pSport 1 | LP014 |
| HEFM | Adrenal Gland, normal | pSport 1 | LP014 |
| HBAA | Rectum normal | pSport 1 | LP014 |
| HFDM | Rectum tumour | pSport 1 | LP014 |
| HGAM | Colon, normal | pSport 1 | LP014 |
| HHMM | Colon, tumour | pSport 1 | LP014 |
| HCLB HCLC | Human Lung Cancer | Lambda Zap II | LP015 |
| HRLA | L1 Cell line | ZAP Express | LP015 |
| HHAM | Hypothalamus, Alzheimer's | pCMVSport 3.0 | LP015 |
| HKBA | Ku 812F Basophils Line | pSport 1 | LP015 |
| HS2S | Saos2, Dexamethosome Treated | pSport 1 | LP016 |
| HA5A | Lung Carcinoma A549 TNFalpha | pSport 1 | LP016 |
| | activated | | |
| HTFM | TF-1 Cell Line GM-CSF Treated | pSport 1 | LP016 |
| HYAS | Thyroid Tumour | pSport 1 | LP016 |
| HUTS | Larynx Normal | pSport 1 | LP016 |
| HXOA | Larynx Tumor | pSport 1 | LP016 |
| HEAH | Ea.hy.926 cell line | pSport 1 | LP016 |
| HINA | Adenocarcinoma Human | pSport 1 | LP016 |
| HRMA | Lung Mesothelium | pSport 1 | LP016 |
| HLCL | Human Pre-Differentiated Adipocytes | Uni-Zap XR | LP017 |
| HS2A | Saos2 Cells | pSport 1 | LP020 |
| HS2I | Saos2 Cells, Vitamin D3 Treated | pSport 1 | LP020 |
| HUCM | CHME Cell Line, untreated | pSport 1 | LP020 |
| HEPN | Aryepiglottis Normal | pSport 1 | LP020 |
| HPSN | Sinus Piniformis Tumour | pSport 1 | LP020 |
| HNSA | Stomach Normal | pSport 1 | LP020 |
| HNSM | Stomach Tumour | pSport 1 | LP020 |
| HNLA | Liver Normal Met5No | pSport 1 | LP020 |
| HUTA | Liver Tumour Met 5 Tu | pSport 1 | LP020 |
| HOCN | Colon Normal | pSport 1 | LP020 |
| HOCT | Colon Tumor | pSport 1 | LP020 |
| HTNT | Tongue Tumour | pSport 1 | LP020 |
| HLXN | Larynx Normal | pSport 1 | LP020 |
| HLXT | Larynx Tumour | pSport 1 | LP020 |
| HTYN | Thymus | pSport 1 | LP020 |
| HPLN | Placenta | pSport 1 | LP020 |
| HTNG | Tongue Normal | pSport 1 | LP020 |
| HZAA | Thyroid Normal (SDCA2 No) | pSport 1 | LP020 |
| HWES | Thyroid Thyroiditis | pSport 1 | LP020 |
| HFHD | Ficolled Human Stromal Cells, 5Fu | pTrip1Ex2 | LP021 |
| | treated | | |
| HFHM, HFHN | Ficolled Human Stromal Cells, | pTrip1Ex2 | LP021 |
| | Untreated | | |
| HPCI | Hep G2 Cells, lambda library | lambda Zap-CMV XR | LP021 |
| HBCA, HBCB, HBCC | H. Lymph node breast Cancer | Uni-ZAP XR | LP021 |
| HCOK | Chondrocytes | pSPORT1 | LP022 |
| HDCA, HDCB, HDCC | Dendritic Cells From CD34 Cells | pSPORT1 | LP022 |
| HDMA, HDMB | CD40 activated monocyte dendritic | pSPORT1 | LP022 |
| | cells | | |
| HDDM, HDDN, HDDO | LPS activated derived dendritic cells | pSPORT1 | LP022 |
| HPCR | Hep G2 Cells, PCR library | lambda Zap-CMV XR | LP022 |
| HAAA, HAAB, HAAC | Lung, Cancer (4005313A3): Invasive | pSPORT1 | LP022 |
| | Poorly Differentiated Lung | | |
| | Adenocarcinoma | | |
| HIPA, HIPB, HIPC | Lung, Cancer (4005163 B7): Invasive, | pSPORT1 | LP022 |
| | Poorly Diff. Adenocarcinoma, | | |
| | Metastatic | | |
| HOOH, HOOI | Ovary, Cancer: (4004562 B6) Papillary | pSPORT1 | LP022 |
| | Serous Cystic Neoplasm, Low | | |
| | Malignant Pot | | |
| HIDA | Lung, Normal: (4005313 B1) | pSPORT1 | LP022 |
| HUJA, HUJB, HUJC, HUJD, HUJE | B-Cells | pCMVSport 3.0 | LP022 |
| HNOA, HNOB, HNOC, HNOD | Ovary, Normal: (9805C040R) | pSPORT1 | LP022 |
| HNLM | Lung, Normal: (4005313 B1) | pSPORT1 | LP022 |
| HSCL | Stromal Cells | pSPORT1 | LP022 |
| HAAX | Lung, Cancer: (4005313 A3) Invasive | pSPORT1 | LP022 |
| | Poorly-differentiated Metastatic lung | | |
| | adenocarcinoma | | |
| HUUA, HUUB, HUUC, HUUD | B-cells (unstimulated) | pTrip1Ex2 | LP022 |
| HWWA, HWWB, HWWC, HWWD, HWWE, | B-cells (stimulated) | pSPORT1 | LP022 |
| HWWF, HWWG | | | |
| HCCC | Colon, Cancer: (9808C064R) | pCMVSport 3.0 | LP023 |
| HPDO HPDP HPDQ HPDR HPD | Ovary, Cancer (9809C332): Poorly | pSport 1 | LP023 |
| | differentiated adenocarcinoma | | |
| HPCO HPCP HPCQ HPCT | Ovary, Cancer (15395A1F): Grade II | pSport 1 | LP023 |
| | Papillary Carcinoma | | |
| HOCM HOCO HOCP HOCQ | Ovary, Cancer: (15799A1F) Poorly | pSport 1 | LP023 |
| | differentiated carcinoma | | |
| HCBM HCBN HCBO | Breast, Cancer: (4004943 A5) | pSport 1 | LP023 |
| HNBT HNBU HNBV | Breast, Normal: (4005522B2) | pSport 1 | LP023 |
| HBCP HBCQ | Breast, Cancer: (4005522 A2) | pSport 1 | LP023 |
| HBCJ | Breast, Cancer: (9806C012R) | pSport 1 | LP023 |
| HSAM HSAN | Stromal cells 3.88 | pSport 1 | LP023 |
| HVCA HVCB HVCC HVCD | Ovary, Cancer: (4004332 A2) | pSport 1 | LP023 |
| HSCK HSEN HSEO | Stromal cells (HBM3.18) | pSport 1 | LP023 |
| HSCP HSCQ | stromal cell clone 2.5 | pSport 1 | LP023 |
| HUXA | Breast Cancer: (4005385 A2) | pSport 1 | LP023 |
| HCOM HCON HCOO HCOP HCOQ | Ovary, Cancer (4004650 A3): Well- | pSport 1 | LP023 |
| | Differentiated Micropapillary Serous | | |
| | Carcinoma | | |
| HBNM | Breast, Cancer: (9802C020E) | pSport 1 | LP023 |
| HVVA HVVB HVVC HVVD HVVE | Human Bone Marrow, treated | pSport 1 | LP023 |

[0878] Two nonlimiting examples are provided below for isolating a particular clone from the deposited sample of plasmid cDNAs cited for that clone in Table 7. First, a plasmid is directly isolated by screening the clones using a polynucleotide probe corresponding to the nucleotide sequence of SEQ ID NO:X.

[0879] Particularly, a specific polynucleotide with 30-40 nucleotides is synthesized using an Applied Biosystems DNA synthesizer according to the sequence reported. The oligonucleotide is labeled, for instance, with ³²P-γ-ATP using T4 polynucleotide kinase and purified according to routine methods. (E.g., Maniatis et al., Molecular Cloning: A Laboratory Manual, Cold Spring Harbor Press, Cold Spring, N.Y. (1982)). The plasmid mixture is transformed into a suitable host, as indicated above (such as XL-1 Blue (Stratagene)) using techniques known to those of skill in the art, such as those provided by the vector supplier or in related publications or patents cited above. The transformants are plated on 1.5% agar plates (containing the appropriate selection agent, e.g., ampicillin) to a density of about 150 transformants (colonies) per plate. These plates are screened using Nylon membranes according to routine methods for bacterial colony screening (e.g., Sambrook et al., Molecular Cloning: A Laboratory Manual, 2nd Edit., (1989), Cold Spring Harbor Laboratory Press, pages 1.93 to 1.104), or other techniques known to those of skill in the art.

[0880] Alternatively, two primers of 17-20 nucleotides derived from both ends of the nucleotide sequence of SEQ ID NO:X are synthesized and used to amplify the desired cDNA using the deposited cDNA plasmid as a template. The polymerase chain reaction is carried out under routine conditions, for instance, in 25 μl of reaction mixture with 0.5 ug of the above cDNA template. A convenient reaction mixture is 1.5-5 mM MgCl2, 0.01% (w/v) gelatin, 20 μM each of dATP, dCTP, dGTP, dTTP, 25 pmol of each primer and 0.25 Unit of Taq polymerase. Thirty five cycles of PCR (denaturation at 94° C. for 1 min; annealing at 55° C. for 1 min; elongation at 72° C. for 1 min) are performed with a Perkin-Elmer Cetus automated thermal cycler. The amplified product is analyzed by agarose gel electrophoresis and the DNA band with expected molecular weight is excised and purified. The PCR product is verified to be the selected sequence by subcloning and sequencing the DNA product.

[0881] Several methods are available for the identification of the 5′ or 3′ non-coding portions of a gene which may not be present in the deposited clone. These methods include but are not limited to, filter probing, clone enrichment using specific probes, and protocols similar or identical to 5′ and 3′ “RACE” protocols which are well known in the art. For instance, a method similar to 5′ RACE is available for generating the missing 5′ end of a desired full-length transcript. (Fromont-Racine et al., Nucleic Acids Res. 21(7):1683-1684 (1993)).

[0882] Briefly, a specific RNA oligonucleotide is ligated to the 5′ ends of a population of RNA presumably containing full-length gene RNA transcripts. A primer set containing a primer specific to the ligated RNA oligonucleotide and a primer specific to a known sequence of the gene of interest is used to PCR amplify the 5′ portion of the desired full-length gene. This amplified product may then be sequenced and used to generate the full length gene.

[0883] This above method starts with total RNA isolated from the desired source, although poly-A+ RNA can be used. The RNA preparation can then be treated with phosphatase if necessary to eliminate 5′ phosphate groups on degraded or damaged RNA which may interfere with the later RNA ligase step. The phosphatase should then be inactivated and the RNA treated with tobacco acid pyrophosphatase in order to remove the cap structure present at the 5′ ends of messenger RNAs. This reaction leaves a 5′ phosphate group at the 5′ end of the cap cleaved RNA which can then be ligated to an RNA oligonucleotide using T4 RNA ligase.

[0884] This modified RNA preparation is used as a template for first strand cDNA synthesis using a gene specific oligonucleotide. The first strand synthesis reaction is used as a template for PCR amplification of the desired 5′ end using a primer specific to the ligated RNA oligonucleotide and a primer specific to the known sequence of the gene of interest. The resultant product is then sequenced and analyzed to confirm that the 5′ end sequence belongs to the desired gene.

### Example 2

### Isolation of Genomic Clones Corresponding to a Polynucleotide

[0885] A human genomic PI library (Genomic Systems, Inc.) is screened by PCR using primers selected for the sequence corresponding to SEQ ID NO:X according to the method described in Example 1. (See also, Sambrook.)

### Example 3

### Tissue specific expression analysis

[0886] The Human Genome Sciences, Inc. (HGS) database is derived from sequencing tissue and/or disease specific cDNA libraries. Libraries generated from a particular tissue are selected and the specific tissue expression pattern of EST groups or assembled contigs within these libraries is determined by comparison of the expression patterns of those groups or contigs within the entire database. ESTs and assembled contigs which show tissue specific expression are selected.

[0887] The original clone from which the specific EST sequence was generated, or in the case of an assembled contig, the clone from which the 5′ most EST sequence was generated, is obtained from the catalogued library of clones and the insert amplified by PCR using methods known in the art. The PCR product is denatured and then transferred in 96 or 384 well format to a nylon membrane (Schleicher and Scheull) generating an array filter of tissue specific clones. Housekeeping genes, maize genes, and known tissue specific genes are included on the filters. These targets can be used in signal normalization and to validate assay sensitivity. Additional targets are included to monitor probe length and specificity of hybridization.

[0888] Radioactively labeled hybridization probes are generated by first strand cDNA synthesis per the manufacturer's instructions (Life Technologies) from mRNA/RNA samples prepared from the specific tissue being analyzed (e.g., prostate, prostate cancer, ovarian, ovarian cancer, etc.). The hybridization probes are purified by gel exclusion chromatography, quantitated, and hybridized with the array filters in hybridization bottles at 65° C. overnight. The filters are washed under stringent conditions and signals are captured using a Fuji phosphorimager.

[0889] Data is extracted using AIS software and following background subtraction, signal normalization is performed. This includes a normalization of filter-wide expression levels between different experimental runs. Genes that are differentially expressed in the tissue of interest are identified.

### Example 4

### Chromosomal Mapping of the Polynucleotides

[0890] An oligonucleotide primer set is designed according to the sequence at the 5′ end of SEQ ID NO:X. This primer preferably spans about 100 nucleotides. This primer set is then used in a polymerase chain reaction under the following set of conditions: 30 seconds, 95° C.; 1 minute, 56° C.; 1 minute, 70° C. This cycle is repeated 32 times followed by one 5 minute cycle at 70° C. Human, mouse, and hamster DNA is used as template in addition to a somatic cell hybrid panel containing individual chromosomes or chromosome fragments (Bios, Inc). The reactions are analyzed on either 8% polyacrylamide gels or 3.5% agarose gels. Chromosome mapping is determined by the presence of an approximately 100 bp PCR fragment in the particular somatic cell hybrid.

### Example 5

### Bacterial Expression of a Polypeptide

[0891] A polynucleotide encoding a polypeptide of the present invention is amplified using PCR oligonucleotide primers corresponding to the 5′ and 3′ ends of the DNA sequence, as outlined in Example 1, to synthesize insertion fragments. The primers used to amplify the cDNA insert should preferably contain restriction sites, such as BamHI and XbaI, at the 5′ end of the primers in order to clone the amplified product into the expression vector. For example, BamHI and XbaI correspond to the restriction enzyme sites on the bacterial expression vector pQE-9. (Qiagen, Inc., Chatsworth, Calif.). This plasmid vector encodes antibiotic resistance (Amp^{r}), a bacterial origin of replication (ori), an IPTG-regulatable promoter/operator (P/O), a ribosome binding site (RBS), a 6-histidine tag (6-His), and restriction enzyme cloning sites.

[0892] The pQE-9 vector is digested with BamHI and XbaI and the amplified fragment is ligated into the pQE-9 vector maintaining the reading frame initiated at the bacterial RBS. The ligation mixture is then used to transform the E. coli strain M15/rep4 (Qiagen, Inc.) which contains multiple copies of the plasmid pREP4, which expresses the lacI repressor and also confers kanamycin resistance (Kan^{r}). Transformants are identified by their ability to grow on LB plates and ampicillin/kanamycin resistant colonies are selected. Plasmid DNA is isolated and confirmed by restriction analysis.

[0893] Clones containing the desired constructs are grown overnight (O/N) in liquid culture in LB media supplemented with both Amp (100 ug/ml) and Kan (25 ug/ml). The O/N culture is used to inoculate a large culture at a ratio of 1:100 to 1:250. The cells are grown to an optical density 600 (O.D.⁶⁰⁰) of between 0.4 and 0.6. IPTG (Isopropyl-B-D-thiogalacto pyranoside) is then added to a final concentration of 1 mM. IPTG induces by inactivating the lacI repressor, clearing the P/O leading to increased gene expression.

[0894] Cells are grown for an extra 3 to 4 hours. Cells are then harvested by centrifugation (20 mins at 6000×g). The cell pellet is solubilized in the chaotropic agent 6 Molar Guanidine HCl by stirring for 3-4 hours at 4° C. The cell debris is removed by centrifugation, and the supernatant containing the polypeptide is loaded onto a nickel-nitrilo-tri-acetic acid (“Ni-NTA”) affinity resin column (available from QIAGEN, Inc., supra). Proteins with a 6×His tag bind to the Ni-NTA resin with high affinity and can be purified in a simple one-step procedure (for details see: The QIAexpressionist (1995) QIAGEN, Inc., supra).

[0895] Briefly, the supernatant is loaded onto the column in 6 M guanidine-HCl, pH 8. The column is first washed with 10 volumes of 6 M guanidine-HCl, pH 8, then washed with 10 volumes of 6 M guanidine-HCl pH 6, and finally the polypeptide is eluted with 6 M guanidine-HCl, pH 5.

[0896] The purified protein is then renatured by dialyzing it against phosphate-buffered saline (PBS) or 50 mM Na-acetate, pH 6 buffer plus 200 mM NaCl. Alternatively, the protein can be successfully refolded while immobilized on the Ni-NTA column. The recommended conditions are as follows: renature using a linear 6M-1M urea gradient in 500 mM NaCl, 20% glycerol, 20 mM Tris/HCl pH 7.4, containing protease inhibitors. The renaturation should be performed over a period of 1.5 hours or more. After renaturation the proteins are eluted by the addition of 250 mM immidazole. Immidazole is removed by a final dialyzing step against PBS or 50 mM sodium acetate pH 6 buffer plus 200 mM NaCl. The purified protein is stored at 4° C. or frozen at −80° C.

[0897] In addition to the above expression vector, the present invention further includes an expression vector, called pHE4a (ATCC Accession Number 209645, deposited on Feb. 25, 1998) which contains phage operator and promoter elements operatively linked to a polynucleotide of the present invention, called pHE4a. (ATCC Accession Number 209645, deposited on Feb. 25, 1998.) This vector contains: 1) a neomycinphosphotransferase gene as a selection marker, 2) an E. coli origin of replication, 3) a T5 phage promoter sequence, 4) two lac operator sequences, 5) a Shine-Delgarno sequence, and 6) the lactose operon repressor gene (lacIq). The origin of replication (oriC) is derived from pUC19 (LTI, Gaithersburg, Md.). The promoter and operator sequences are made synthetically.

[0898] DNA can be inserted into the pHE4a by restricting the vector with NdeI and XbaI, BamHI, XhoI, or Asp718, running the restricted product on a gel, and isolating the larger fragment (the stuffer fragment should be about 310 base pairs). The DNA insert is generated according to the PCR protocol described in Example 1, using PCR primers having restriction sites for NdeI (5′ primer) and XbaI, BamHI, XhoI, or Asp718 (3′ primer). The PCR insert is gel purified and restricted with compatible enzymes. The insert and vector are ligated according to standard protocols.

[0899] The engineered vector could easily be substituted in the above protocol to express protein in a bacterial system.

### Example 6

### Purification of a Polypeptide from an Inclusion Body

[0900] The following alternative method can be used to purify a polypeptide expressed in E coli when it is present in the form of inclusion bodies. Unless otherwise specified, all of the following steps are conducted at 4-10° C.

[0901] Upon completion of the production phase of the E. coli fermentation, the cell culture is cooled to 4-10° C. and the cells harvested by continuous centrifugation at 15,000 rpm (Heraeus Sepatech). On the basis of the expected yield of protein per unit weight of cell paste and the amount of purified protein required, an appropriate amount of cell paste, by weight, is suspended in a buffer solution containing 100 mM Tris, 50 mM EDTA, pH 7.4. The cells are dispersed to a homogeneous suspension using a high shear mixer.

[0902] The cells are then lysed by passing the solution through a microfluidizer (Microfuidics, Corp. or APV Gaulin, Inc.) twice at 4000-6000 psi. The homogenate is then mixed with NaCl solution to a final concentration of 0.5 M NaCl, followed by centrifugation at 7000×g for 15 min. The resultant pellet is washed again using 0.5M NaCl, 100 mM Tris, 50 mM EDTA, pH 7.4.

[0903] The resulting washed inclusion bodies are solubilized with 1.5 M guanidine hydrochloride (GuHCl) for 2-4 hours. After 7000×g centrifugation for 15 min., the pellet is discarded and the polypeptide containing supernatant is incubated at 4° C. overnight to allow further GuHCl extraction.

[0904] Following high speed centrifugation (30,000×g) to remove insoluble particles, the GuHCl solubilized protein is refolded by quickly mixing the GuHCl extract with 20 volumes of buffer containing 50 mM sodium, pH 4.5, 150 mM NaCl, 2 mM EDTA by vigorous stirring. The refolded diluted protein solution is kept at 4° C. without mixing for 12 hours prior to further purification steps.

[0905] To clarify the refolded polypeptide solution, a previously prepared tangential filtration unit equipped with 0.16 μm membrane filter with appropriate surface area (e.g., Filtron), equilibrated with 40 mM sodium acetate, pH 6.0 is employed. The filtered sample is loaded onto a cation exchange resin (e.g., Poros HS-50, Perseptive Biosystems). The column is washed with 40 mM sodium acetate, pH 6.0 and eluted with 250 mM, 500 mM, 1000 mM, and 1500 mM NaCl in the same buffer, in a stepwise manner. The absorbance at 280 nm of the effluent is continuously monitored. Fractions are collected and further analyzed by SDS-PAGE.

[0906] Fractions containing the polypeptide are then pooled and mixed with 4 volumes of water. The diluted sample is then loaded onto a previously prepared set of tandem columns of strong anion (Poros HQ-50, Perseptive Biosystems) and weak anion (Poros CM-20, Perseptive Biosystems) exchange resins. The columns are equilibrated with 40 mM sodium acetate, pH 6.0. Both columns are washed with 40 mM sodium acetate, pH 6.0, 200 mM NaCl. The CM-20 column is then eluted using a 10 column volume linear gradient ranging from 0.2 M NaCl, 50 mM sodium acetate, pH 6.0 to 1.0 M NaCl, 50 mM sodium acetate, pH 6.5. Fractions are collected under constant A₂₈₀ monitoring of the effluent. Fractions containing the polypeptide (determined, for instance, by 16% SDS-PAGE) are then pooled.

[0907] The resultant polypeptide should exhibit greater than 95% purity after the above refolding and purification steps. No major contaminant bands should be observed from Commassie blue stained 16% SDS-PAGE gel when 5 μg of purified protein is loaded. The purified protein can also be tested for endotoxin/LPS contamination, and typically the LPS content is less than 0.1 ng/ml according to LAL assays.

### Example 7

### Cloning and Expression of a Polypeptide in a Baculovirus Expression System

[0908] In this example, the plasmid shuttle vector pA2 is used to insert a polynucleotide into a baculovirus to express a polypeptide. This expression vector contains the strong polyhedrin promoter of the Autographa californica nuclear polyhedrosis virus (AcMNPV) followed by convenient restriction sites such as BamHI, Xba I and Asp718. The polyadenylation site of the simian virus 40 (“SV40”) is used for efficient polyadenylation. For easy selection of recombinant virus, the plasmid contains the beta-galactosidase gene from E. coli under control of a weak Drosophila promoter in the same orientation, followed by the polyadenylation signal of the polyhedrin gene. The inserted genes are flanked on both sides by viral sequences for cell-mediated homologous recombination with wild-type viral DNA to generate a viable virus that express the cloned polynucleotide.

[0909] Many other baculovirus vectors can be used in place of the vector above, such as pAc373, pVL941, and pAcIM1, as one skilled in the art would readily appreciate, as long as the construct provides appropriately located signals for transcription, translation, secretion and the like, including a signal peptide and an in-frame AUG as required. Such vectors are described, for instance, in Luckow et al., Virology 170:31-39 (1989).

[0910] Specifically, the cDNA sequence contained in the deposited clone, including the AUG initiation codon, is amplified using the PCR protocol described in Example 1. If a naturally occurring signal sequence is used to produce the polypeptide of the present invention, the pA2 vector does not need a second signal peptide. Alternatively, the vector can be modified (pA2 GP) to include a baculovirus leader sequence, using the standard methods described in Summers et al., “A Manual of Methods for Baculovirus Vectors and Insect Cell Culture Procedures,” Texas Agricultural Experimental Station Bulletin No. 1555 (1987).

[0911] The amplified fragment is isolated from a 1% agarose gel using a commercially available kit (“Geneclean,” BIO 101 Inc., La Jolla, Calif.). The fragment then is digested with appropriate restriction enzymes and again purified on a 1% agarose gel.

[0912] The plasmid is digested with the corresponding restriction enzymes and optionally, can be dephosphorylated using calf intestinal phosphatase, using routine procedures known in the art. The DNA is then isolated from a 1% agarose gel using a commercially available kit (“Geneclean” BIO 101 Inc., La Jolla, Calif.).

[0913] The fragment and the dephosphorylated plasmid are ligated together with T4 DNA ligase. E. coli HB101 or other suitable E. coli hosts such as XL-1 Blue (Stratagene Cloning Systems, La Jolla, Calif.) cells are transformed with the ligation mixture and spread on culture plates. Bacteria containing the plasmid are identified by digesting DNA from individual colonies and analyzing the digestion product by gel electrophoresis. The sequence of the cloned fragment is confirmed by DNA sequencing.

[0914] Five μg of a plasmid containing the polynucleotide is co-transfected with 1.0 μg of a commercially available linearized baculovirus DNA (“BaculoGold™ baculovirus DNA, Pharmingen, San Diego, Calif.), using the lipofection method described by Felgner et al., Proc. Natl. Acad. Sci. USA 84:7413-7417 (1987). One μg of BaculoGold™ virus DNA and 5 μg of the plasmid are mixed in a sterile well of a microtiter plate containing 50 μl of serum-free Grace's medium (Life Technologies Inc., Gaithersburg, Md.). Afterwards, 10 μl Lipofectin plus 90 μl Grace's medium are added, mixed and incubated for 15 minutes at room temperature. Then the transfection mixture is added drop-wise to Sf9 insect cells (ATCC CRL 1711) seeded in a 35 mm tissue culture plate with 1 ml Grace's medium without serum. The plate is then incubated for 5 hours at 27° C. The transfection solution is then removed from the plate and 1 ml of Grace's insect medium supplemented with 10% fetal calf serum is added. Cultivation is then continued at 27° C. for four days.

[0915] After four days the supernatant is collected and a plaque assay is performed, as described by Summers and Smith, supra. An agarose gel with “Blue Gal” (Life Technologies Inc., Gaithersburg) is used to allow easy identification and isolation of gal-expressing clones, which produce blue-stained plaques. (A detailed description of a “plaque assay” of this type can also be found in the user's guide for insect cell culture and bacutovirology distributed by Life Technologies Inc., Gaithersburg, page 9-10.) After appropriate incubation, blue stained plaques are picked with the tip of a micropipettor (e.g., Eppendorf). The agar containing the recombinant viruses is then resuspended in a microcentrifuge tube containing 200 μl of Grace's medium and the suspension containing the recombinant baculovirus is used to infect S19 cells seeded in 35 mm dishes. Four days later the supernatants of these culture dishes are harvested and then they are stored at 4° C.

[0916] To verify the expression of the polypeptide, Sf9 cells are grown in Grace's medium supplemented with 10% heat-inactivated FBS. The cells are infected with the recombinant baculovirus containing the polynucleotide at a multiplicity of infection (“MOI”) of about 2. If radiolabeled proteins are desired, 6 hours later the medium is removed and is replaced with SF900 II medium minus methionine and cysteine (available from Life Technologies Inc., Rockville, Md.). After 42 hours, 5 μCi of ³⁵S-methionine and 5 μCi ³⁵S-cysteine (available from Amersham) are added. The cells are further incubated for 16 hours and then are harvested by centrifugation. The proteins in the supernatant as well as the intracellular proteins are analyzed by SDS-PAGE followed by autoradiography (if radiolabeled).

[0917] Microsequencing of the amino acid sequence of the amino terminus of purified protein may be used to determine the amino terminal sequence of the produced protein.

### Example 8

### Expression of a Polypeptide in Mammalian Cells

[0918] The polypeptide of the present invention can be expressed in a mammalian cell. A typical mammalian expression vector contains a promoter element, which mediates the initiation of transcription of mRNA, a protein coding sequence, and signals required for the termination of transcription and polyadenylation of the transcript. Additional elements include enhancers, Kozak sequences and intervening sequences flanked by donor and acceptor sites for RNA splicing. Highly efficient transcription is achieved with the early and late promoters from SV40, the long terminal repeats (LTRs) from Retroviruses, e.g., RSV, HTLVI, HIVI and the early promoter of the cytomegalovirus (CMV). However, cellular elements can also be used (e.g., the human actin promoter).

[0919] Suitable expression vectors for use in practicing the present invention include, for example, vectors such as pSVL and pMSG (Pharmacia, Uppsala, Sweden), pRSVcat (ATCC 37152), pSV2dhfr (ATCC 37146), pBC12MI (ATCC 67109), pCMVSport 2.0, and pCMVSport 3.0. Mammalian host cells that could be used include, human Hela, 293, H9 and Jurkat cells, mouse NIH3T3 and C127 cells, Cos 1, Cos 7 and CV1, quail QC1-3 cells, mouse L cells and Chinese hamster ovary (CHO) cells.

[0920] Alternatively, the polypeptide can be expressed in stable cell lines containing the polynucleotide integrated into a chromosome. The co-transfection with a selectable marker such as DHFR, gpt, neomycin, or hygromycin allows the identification and isolation of the transfected cells.

[0921] The transfected gene can also be amplified to express large amounts of the encoded protein. The DHFR (dihydrofolate reductase) marker is useful in developing cell lines that carry several hundred or even several thousand copies of the gene of interest. (See, e.g., Alt, F. W., et al., J. Biol. Chem. 253:1357-1370 (1978); Hamlin, J. L. and Ma, C., Biochem. et Biophys. Acta, 1097:107-143 (1990); Page, M. J. and Sydenham, M. A., Biotechnology 9:64-68 (1991)). Another useful selection marker is the enzyme glutamine synthase (GS) (Murphy et al., Biochem J. 227:277-279 (1991); Bebbington et al., Bio/Technology 10:169-175 (1992). Using these markers, the mammalian cells are grown in selective medium and the cells with the highest resistance are selected. These cell lines contain the amplified gene(s) integrated into a chromosome. Chinese hamster ovary (CHO) and NSO cells are often used for the production of proteins.

[0922] Derivatives of the plasmid pSV2-dhfr (ATCC Accession No. 37146), the expression vectors pC4 (ATCC Accession No. 209646) and pC6 (ATCC Accession No.209647) contain the strong promoter (LTR) of the Rous Sarcoma Virus (Cullen et al., Molecular and Cellular Biology, 438-447 (March, 1985)) plus a fragment of the CMV-enhancer (Boshart et al., Cell 41:521-530 (1985)). Multiple cloning sites, e.g., with the restriction enzyme cleavage sites BamHI, XbaI and Asp718, facilitate the cloning of the gene of interest. The vectors also contain the 3′ intron, the polyadenylation and termination signal of the rat preproinsulin gene, and the mouse DHFR gene under control of the SV40 early promoter.

[0923] Specifically, the plasmid pC6, for example, is digested with appropriate restriction enzymes and then dephosphorylated using calf intestinal phosphates by procedures known in the art. The vector is then isolated from a 1% agarose gel.

[0924] A polynucleotide of the present invention is amplified according to the protocol outlined in Example 1. If a naturally occurring signal sequence is used to produce the polypeptide of the present invention, the vector does not need a second signal peptide. Alternatively, if a naturally occurring signal sequence is not used, the vector can be modified to include a heterologous signal sequence. (See, e.g., International Publication No. WO 96/34891.)

[0925] The amplified fragment is isolated from a 1% agarose gel using a commercially available kit (“Geneclean,” BIO 101 Inc., La Jolla, Calif.). The fragment then is digested with appropriate restriction enzymes and again purified on a 1% agarose gel.

[0926] The amplified fragment is then digested with the same restriction enzyme and purified on a 1% agarose gel. The isolated fragment and the dephosphorylated vector are then ligated with T4 DNA ligase. E. coli HB101 or XL-1 Blue cells are then transformed and bacteria are identified that contain the fragment inserted into plasmid pC6 using, for instance, restriction enzyme analysis.

[0927] Chinese hamster ovary cells lacking an active DHFR gene is used for transfection. Five μg of the expression plasmid pC6 or pC4 is cotransfected with 0.5 μg of the plasmid pSVneo using lipofectin (Felgner et al., supra). The plasmid pSV2-neo contains a dominant selectable marker, the neo gene from Tn5 encoding an enzyme that confers resistance to a group of antibiotics including G418. The cells are seeded in alpha minus MEM supplemented with 1 mg/ml G418. After 2 days, the cells are trypsinized and seeded in hybridoma cloning plates (Greiner, Germany) in alpha minus MEM supplemented with 10, 25, or 50 ng/ml of methotrexate plus 1 mg/ml G418. After about 10-14 days single clones are trypsinized and then seeded in 6-well petri dishes or 10 ml flasks using different concentrations of methotrexate (50 nM, 100 nM, 200 nM, 400 nM, 800 nM). Clones growing at the highest concentrations of methotrexate are then transferred to new 6-well plates containing even higher concentrations of methotrexate (1 μM, 2 μM, 5 μM, 10 mM, 20 mM). The same procedure is repeated until clones are obtained which grow at a concentration of 100-200 μM. Expression of the desired gene product is analyzed, for instance, by SDS-PAGE and Western blot or by reversed phase HPLC analysis.

### Example 9

### Protein Fusions

[0928] The polypeptides of the present invention are preferably fused to other proteins. These fusion proteins can be used for a variety of applications. For example, fusion of the present polypeptides to His-tag, HA-tag, protein A, IgG domains, and maltose binding protein facilitates purification. (See Example 5; see also EP A 394,827; Traunecker, et al., Nature 331:84-86 (1988)). Similarly, fusion to IgG-1, IgG-3, and albumin increases the halflife time in vivo. Nuclear localization signals fused to the polypeptides of the present invention can target the protein to a specific subcellular localization, while covalent heterodimer or homodimers can increase or decrease the activity of a fusion protein. Fusion proteins can also create chimeric molecules having more than one function. Finally, fusion proteins can increase solubility and/or stability of the fused protein compared to the non-fused protein. All of the types of fusion proteins described above can be made by modifying the following protocol, which outlines the fusion of a polypeptide to an IgG molecule, or the protocol described in Example 5.

[0929] Briefly, the human Fc portion of the IgG molecule can be PCR amplified, using primers that span the 5′ and 3′ ends of the sequence described below. These primers also should have convenient restriction enzyme sites that will facilitate cloning into an expression vector, preferably a mammalian expression vector.

[0930] For example, if pC4 (ATCC Accession No. 209646) is used, the human Fc portion can be ligated into the BamHI cloning site. Note that the 3′ BamHI site should be destroyed. Next, the vector containing the human Fc portion is re-restricted with BamHI, linearizing the vector, and a polynucleotide of the present invention, isolated by the PCR protocol described in Example 1, is ligated into this BamHI site. Note that the polynucleotide is cloned without a stop codon, otherwise a fusion protein will not be produced.

[0931] If the naturally occurring signal sequence is used to produce the polypeptide of the present invention, pC4 does not need a second signal peptide. Alternatively, if the naturally occurring signal sequence is not used, the vector can be modified to include a heterologous signal sequence. (See, e.g., International Publication No. WO 96/34891.)

[0932] Human IgG Fc region:

| | |
|---|---|
| GGGATCCGGAGCCCAAATCTTCTGACAAAACTCACACATGCCCACCGTGCCCA | (SEQ ID NO: 1) |
| GCACCTGAATTCGAGGGTGCACCGTCAGTCTTCCTCTTCCCCCCAAAACCCAAG | |
| GACACCCTCATGATCTCCCGGACTCCTGAGGTCACATGCGTGGTGGTGGACGTA | |
| AGCCACGAAGACCCTGAGGTCAAGTTCAACTGGTACGTGGACGGCGTGGAGGT | |
| GCATAATGCCAAGACAAAGCCGCGGGAGGAGCAGTACAACAGCACGTACCGTG | |
| TGGTCAGCGTCCTCACCGTCCTGCACCAGGACTGGCTGAATGGCAAGGAGTAC | |
| AAGTGCAAGGTCTCCAACAAAGCCCTCCCAACCCCCATCGAGAAAACCATCTC | |
| CAAAGCCAAAGGGCAGCCCCGAGAACCACAGGTGTACACCCTGCCCCCATCCC | |
| GGGATGAGCTGACCAAGAACCAGGTCAGCCTGACCTGCCTGGTCAAAGGCTTC | |
| TATCCAAGCGACATCGCCGTGGAGTGGGAGAGCAATGGGCAGCCGGAGAACAA | |
| CTACAAGACCACGCCTCCCGTGCTGGACTCCGACGGCTCCTTCTTCCTCTACAG | |
| CAAGCTCACCGTGGACAAGAGCAGGTGGCAGCAGGGGAACGTCTTCTCATGCT | |
| CCGTGATGCATGAGGCTCTGCACAACCACTACACGCAGAAGAGCCTCTCCCTGT | |
| CTCCGGGTAAATGAGTGCGACGGCCGCGACTCTAGAGGAT | |

### Example 10

### Production of an Antibody from a Polypeptide

[0933] a) Hybridoma Technology

[0934] The antibodies of the present invention can be prepared by a variety of methods. (See, Current Protocols, Chapter 2.) As one example of such methods, cells expressing a polypeptide of the present invention are administered to an animal to induce the production of sera containing polyclonal antibodies. In a preferred method, a preparation of a a polypeptide of the present invention is prepared and purified to render it substantially free of natural contaminants. Such a preparation is then introduced into an animal in order to produce polyclonal antisera of greater specific activity.

[0935] Monoclonal antibodies specific for a polypeptide of the present invention are prepared using hybridoma technology (Kohler et al., Nature 256:495 (1975); Kohler et al., Eur. J. Immunol. 6:511 (1976); Kohler et al., Eur. J. Immunol. 6:292 (1976); Hammerling et al., in: Monoclonal Antibodies and T-Cell Hybridomas, Elsevier, N.Y., pp. 563-681 (1981)). In general, an animal (preferably a mouse) is immunized with a polypeptide of the present invention or, more preferably, with a secreted polypeptide of the present invention-expressing cell. Such polypeptide-expressing cells are cultured in any suitable tissue culture medium, preferably in Earle's modified Eagle's medium supplemented with 10% fetal bovine serum (inactivated at about 56° C.), and supplemented with about 10 g/l of nonessential amino acids, about 1,000 U/ml of penicillin, and about 100 μg/ml of streptomycin.

[0936] The splenocytes of such mice are extracted and fused with a suitable myeloma cell line. Any suitable myeloma cell line may be employed in accordance with the present invention; however, it is preferable to employ the parent myeloma cell line (SP20), available from the ATCC. After fusion, the resulting hybridoma cells are selectively maintained in HAT medium, and then cloned by limiting dilution as described by Wands et al. (Gastroenterology 80:225-232 (1981)). The hybridoma cells obtained through such a selection are then assayed to identify clones which secrete antibodies capable of binding the polypeptide of the present invention.

[0937] Alternatively, additional antibodies capable of binding to polypeptide of the present invention can be produced in a two-step procedure using anti-idiotypic antibodies. Such a method makes use of the fact that antibodies are themselves antigens, and therefore, it is possible to obtain an antibody which binds to a second antibody. In accordance with this method, protein specific antibodies are used to immunize an animal, preferably a mouse. The splenocytes of such an animal are then used to produce hybridoma cells, and the hybridoma cells are screened to identify clones which produce an antibody whose ability to bind to the polypeptide of the present invention-specific antibody can be blocked by polypeptide of the present invention. Such antibodies comprise anti-idiotypic antibodies to the polypeptide of the present invention-specific antibody and are used to immunize an animal to induce formation of further polypeptide of the present invention-specific antibodies.

[0938] For in vivo use of antibodies in humans, an antibody is “humanized”. Such antibodies can be produced using genetic constructs derived from hybridoma cells producing the monoclonal antibodies described above. Methods for producing chimeric and humanized antibodies are known in the art and are discussed herein. (See, for review, Morrison, Science 229:1202 (1985); Oi et al., BioTechniques 4:214 (1986); Cabilly et al., U.S. Pat. No. 4,816,567; Taniguchi et al., EP 171496; Morrison et al., EP 173494; Neuberger et al., WO 8601533; Robinson et al., International Publication No. WO 8702671; Boulianne et al., Nature 312:643 (1984); Neuberger et al., Nature 314:268 (1985)).

[0939] b) Isolation of Antibody Fragments Directed Against Polypeptide of the Present Invention From a Library of scFvs

[0940] Naturally occurring V-genes isolated from human PBLs are constructed into a library of antibody fragments which contain reactivities against polypeptide of the present invention to which the donor may or may not have been exposed (see e.g., U.S. Pat. No. 5,885,793 incorporated herein by reference in its entirety).

[0941] Rescue of the Library. A library of scFvs is constructed from the RNA of human PBLs as described in International Publication No. WO 92/01047. To rescue phage displaying antibody fragments, approximately 10⁹ E. coli harboring the phagemid are used to inoculate 50 ml of 2×TY containing 4% glucose and 100 μg/ml of ampicillin (2×TY-AMP-GLU) and grown to an O.D. of 0.8 with shaking. Five ml of this culture is used to inoculate 50 ml of 2×TY-AMP-GLU, 2×108 TU of delta gene 3 helper (Ml3 delta gene III, see International Publication No. WO 92/01047) are added and the culture incubated at 37° C. for 45 minutes without shaking and then at 37° C. for 45 minutes with shaking. The culture is centrifuged at 4000 r.p.m. for 10 min. and the pellet resuspended in 2 liters of 2×TY containing 100 μg/ml ampicillin and 50 ug/ml kanamycin and grown overnight. Phage are prepared as described in International Publication No. WO 92/01047.

[0942] M13 delta gene III is prepared as follows: M13 delta gene III helper phage does not encode gene III protein, hence the phage(mid) displaying antibody fragments have a greater avidity of binding to antigen. Infectious M13 delta gene III particles are made by growing the helper phage in cells harboring a pUC19 derivative supplying the wild type gene III protein during phage morphogenesis. The culture is incubated for 1 hour at 37° C. without shaking and then for a further hour at 37° C. with shaking. Cells are spun down (IEC-Centra 8,400 r.p.m. for 10 min), resuspended in 300 ml 2×TY broth containing 100 μg ampicillin/ml and 25 μg kanamycin/ml (2×TY-AMP-KAN) and grown overnight, shaking at 37° C. Phage particles are purified and concentrated from the culture medium by two PEG-precipitations (Sambrook et al., 1990), resuspended in 2 ml PBS and passed through a 0.45 μm filter (Minisart NML; Sartorius) to give a final concentration of approximately 10¹³ transducing units/ml (ampicillin-resistant clones).

[0943] Panning of the Library. Immunotubes (Nunc) are coated overnight in PBS with 4 ml of either 100 μg/ml or 10 μg/ml of a polypeptide of the present invention. Tubes are blocked with 2% Marvel-PBS for 2 hours at 37° C. and then washed 3 times in PBS. Approximately 10¹³ TU of phage is applied to the tube and incubated for 30 minutes at room temperature tumbling on an over and under turntable and then left to stand for another 1.5 hours. Tubes are washed 10 times with PBS 0.1% Tween-20 and 10 times with PBS. Phage are eluted by adding 1 ml of 100 mM triethylamine and rotating 15 minutes on an under and over turntable after which the solution is immediately neutralized with 0.5 ml of 1.0M Tris-HCl, pH 7.4. Phage are then used to infect 10 ml of mid-log E. coli TG1 by incubating eluted phage with bacteria for 30 minutes at 37° C. The E. coli are then plated on TYE plates containing 1% glucose and 100 μg/ml ampicillin. The resulting bacterial library is then rescued with delta gene 3 helper phage as described above to prepare phage for a subsequent round of selection. This process is then repeated for a total of 4 rounds of affinity purification with tube-washing increased to 20 times with PBS, 0.1% Tween-20 and 20 times with PBS for rounds 3 and 4.

[0944] Characterization of Binders. Eluted phage from the 3rd and 4th rounds of selection are used to infect E. coli HB 2151 and soluble scFv is produced (Marks, et al., 1991) from single colonies for assay. ELISAs are performed with microtitre plates coated with either 10 pg/ml of the polypeptide of the present invention in 50 mM bicarbonate pH 9.6. Clones positive in ELISA are further characterized by PCR fingerprinting (see, e.g., International Publication No. WO 92/01047) and then by sequencing. These ELISA positive clones may also be further characterized by techniques known in the art, such as, for example, epitope mapping, binding affinity, receptor signal transduction, ability to block or competitively inhibit antibody/antigen binding, and competitive agonistic or antagonistic activity.

### Example 11

### Method of Determining Alterations in a Gene Corresponding to a Polynucleotide

[0945] RNA isolated from entire families or individual patients presenting with a phenotype of interest (such as a disease) is isolated. cDNA is then generated from these RNA samples using protocols known in the art. (See, Sambrook.) The cDNA is then used as a template for PCR, employing primers surrounding regions of interest in SEQ ID NO:X; and/or the nucleotide sequence of the cDNA contained in Clone ID NO:Z. Suggested PCR conditions consist of 35 cycles at 95 degrees C. for 30 seconds; 60-120 seconds at 52-58 degrees C.; and 60-120 seconds at 70 degrees C., using buffer solutions described in Sidransky et al., Science 252:706 (1991).

[0946] PCR products are then sequenced using primers labeled at their 5′ end with T4 polynucleotide kinase, employing SequiThern Polymerase (Epicentre Technologies). The intron-exon boundaries of selected exons is also determined and genomic PCR products analyzed to confirm the results. PCR products harboring suspected mutations are then cloned and sequenced to validate the results of the direct sequencing.

[0947] PCR products are cloned into T-tailed vectors as described in Holton et al., Nucleic Acids Research, 19:1156 (1991) and sequenced with T7 polymerase (United States Biochemical). Affected individuals are identified by mutations not present in unaffected individuals.

[0948] Genomic rearrangements are also observed as a method of determining alterations in a gene corresponding to a polynucleotide. Genomic clones isolated according to Example 2 are nick-translated with digoxigenindeoxy-uridine 5′-triphosphate (Boehringer Manheim), and FISH performed as described in Johnson et al., Methods Cell Biol. 35:73-99 (1991). Hybridization with the labeled probe is carried out using a vast excess of human cot-I DNA for specific hybridization to the corresponding genomic locus.

[0949] Chromosomes are counterstained with 4,6-diamino-2-phenylidole and propidium iodide, producing a combination of C- and R-bands. Aligned images for precise mapping are obtained using a triple-band filter set (Chroma Technology, Brattleboro, Vt.) in combination with a cooled charge-coupled device camera (Photometrics, Tucson, Ariz.) and variable excitation wavelength filters. (Johnson et al., Genet. Anal. Tech. Appl., 8:75 (1991)). Image collection, analysis and chromosomal fractional length measurements are performed using the ISee Graphical Program System. (Inovision Corporation, Durham, N.C.) Chromosome alterations of the genomic region hybridized by the probe are identified as insertions, deletions, and translocations. These alterations are used as a diagnostic marker for an associated disease.

### Example 12

### Method of Detecting Abnormal Levels of a Polypeptide in a Biological Sample

[0950] A polypeptide of the present invention can be detected in a biological sample, and if an increased or decreased level of the polypeptide is detected, this polypeptide is a marker for a particular phenotype. Methods of detection are numerous, and thus, it is understood that one skilled in the art can modify the following assay to fit their particular needs.

[0951] For example, antibody-sandwich ELISAs are used to detect polypeptides in a sample, preferably a biological sample. Wells of a microtiter plate are coated with specific antibodies, at a final concentration of 0.2 to 10 ug/ml. The antibodies are either monoclonal or polyclonal and are produced by the method described in Example 10. The wells are blocked so that non-specific binding of the polypeptide to the well is reduced.

[0952] The coated wells are then incubated for >2 hours at RT with a sample containing the polypeptide. Preferably, serial dilutions of the sample should be used to validate results. The plates are then washed three times with deionized or distilled water to remove unbound polypeptide.

[0953] Next, 50 ul of specific antibody-alkaline phosphatase conjugate, at a concentration of 25-400 ng, is added and incubated for 2 hours at room temperature. The plates are again washed three times with deionized or distilled water to remove unbound conjugate.

[0954] Add 75 ul of 4-methylumbelliferyl phosphate (MUP) or p-nitrophenyl phosphate (NPP) substrate solution to each well and incubate 1 hour at room temperature. Measure the reaction by a microtiter plate reader. Prepare a standard curve, using serial dilutions of a control sample, and plot polypeptide concentration on the X-axis (log scale) and fluorescence or absorbance of the Y-axis (linear scale). Interpolate the concentration of the polypeptide in the sample using the standard curve.

### Example 13

### Formulation

[0955] The invention also provides methods of treatment and/or prevention of diseases or disorders (such as, for example, any one or more of the diseases or disorders disclosed herein) by administration to a subject of an effective amount of a Therapeutic. By therapeutic is meant polynucleotides or polypeptides of the invention (including fragments and variants), agonists or antagonists thereof, and/or antibodies thereto, in combination with a pharmaceutically acceptable carrier type (e.g., a sterile carrier).

[0956] The Therapeutic will be formulated and dosed in a fashion consistent with good medical practice, taking into account the clinical condition of the individual patient (especially the side effects of treatment with the Therapeutic alone), the site of delivery, the method of administration, the scheduling of administration, and other factors known to practitioners. The “effective amount” for purposes herein is thus determined by such considerations.

[0957] As a general proposition, the total pharmaceutically effective amount of the Therapeutic administered parenterally per dose will be in the range of about lug/kg/day to 10 mg/kg/day of patient body weight, although, as noted above, this will be subject to therapeutic discretion. More preferably, this dose is at least 0.01 mg/kg/day, and most preferably for humans between about 0.01 and 1 mg/kg/day for the hormone. If given continuously, the Therapeutic is typically administered at a dose rate of about 1 ug/kg/hour to about 50 ug/kg/hour, either by 1-4 injections per day or by continuous subcutaneous infusions, for example, using a mini-pump. An intravenous bag solution may also be employed. The length of treatment needed to observe changes and the interval following treatment for responses to occur appears to vary depending on the desired effect.

[0958] Therapeutics can be are administered orally, rectally, parenterally, intracistemally, intravaginally, intraperitoneally, topically (as by powders, ointments, gels, drops or transdermal patch), bucally, or as an oral or nasal spray. “Pharmaceutically acceptable carrier” refers to a non-toxic solid, semisolid or liquid filler, diluent, encapsulating material or formulation auxiliary of any. The term “parenteral” as used herein refers to modes of administration which include intravenous, intramuscular, intraperitoneal, intrasternal, subcutaneous and intraarticular injection and infusion.

[0959] Therapeutics of the invention are also suitably administered by sustained-release systems. Suitable examples of sustained-release Therapeutics are administered orally, rectally, parenterally, intracistemally, intravaginally, intraperitoneally, topically (as by powders, ointments, gels, drops or transdermal patch), bucally, or as an oral or nasal spray. “Pharmaceutically acceptable carrier” refers to a non-toxic solid, semisolid or liquid filler, diluent, encapsulating material or formulation auxiliary of any type. The term “parenteral” as used herein refers to modes of administration which include intravenous, intramuscular, intraperitoneal, intrasternal, subcutaneous and intraarticular injection and infusion.

[0960] Therapeutics of the invention are also suitably administered by sustained-release systems. Suitable examples of sustained-release Therapeutics include suitable polymeric materials (such as, for example, semi-permeable polymer matrices in the form of shaped articles, e.g., films, or mirocapsules), suitable hydrophobic materials (for example as an emulsion in an acceptable oil) or ion exchange resins, and sparingly soluble derivatives (such as, for example, a sparingly soluble salt).

[0961] Sustained-release matrices include polylactides (U.S. Pat. No. 3,773,919, EP 58,481), copolymers of L-glutamic acid and gamma-ethyl-L-glutamate (Sidman et al., Biopolymers 22:547-556 (1983)), poly (2-hydroxyethyl methacrylate) (Langer et al., J. Biomed. Mater. Res. 15:167-277 (1981), and Langer, Chem. Tech. 12:98-105 (1982)), ethylene vinyl acetate (Langer et al., Id.) or poly-D-(−)-3-hydroxybutyric acid (EP 133,988).

[0962] Sustained-release Therapeutics also include liposomally entrapped Therapeutics of the invention (see generally, Langer, Science 249:1527-1533 (1990); Treat et al., in Liposomes in the Therapy of Infectious Disease and Cancer, Lopez-Berestein and Fidler (eds.), Liss, New York, pp. 317-327 and 353-365 (1989)). Liposomes containing the Therapeutic are prepared by methods known per se: DE 3,218,121; Epstein et al., Proc. Natl. Acad. Sci. (USA) 82:3688-3692 (1985); Hwang et al., Proc. Natl. Acad. Sci.(USA) 77:4030-4034 (1980); EP 52,322; EP 36,676; EP 88,046; EP 143,949; EP 142,641; Japanese Pat. Appl. 83-118008; U.S. Pat. Nos. 4,485,045 and 4,544,545; and EP 102,324. Ordinarily, the liposomes are of the small (about 200-800 Angstroms) unilamellar type in which the lipid content is greater than about 30 mol. percent cholesterol, the selected proportion being adjusted for the optimal Therapeutic.

[0963] In yet an additional embodiment, the Therapeutics of the invention are delivered by way of a pump (see Langer, supra; Sefton, CRC Crit. Ref. Biomed. Eng. 14:201 (1987); Buchwald et al., Surgery 88:507 (1980); Saudek et al., N. Engl. J. Med. 321:574 (1989)).

[0964] Other controlled release systems are discussed in the review by Langer (Science 249:1527-1533 (1990)).

[0965] For parenteral administration, in one embodiment, the Therapeutic is formulated generally by mixing it at the desired degree of purity, in a unit dosage injectable form (solution, suspension, or emulsion), with a pharmaceutically acceptable carrier, i.e., one that is non-toxic to recipients at the dosages and concentrations employed and is compatible with other ingredients of the formulation. For example, the formulation preferably does not include oxidizing agents and other compounds that are known to be deleterious to the Therapeutic.

[0966] Generally, the formulations are prepared by contacting the Therapeutic uniformly and intimately with liquid carriers or finely divided solid carriers or both. Then, if necessary, the product is shaped into the desired formulation. Preferably the carrier is a parenteral carrier, more preferably a solution that is isotonic with the blood of the recipient. Examples of such carrier vehicles include water, saline, Ringer's solution, and dextrose solution. Non-aqueous vehicles such as fixed oils and ethyl-oleate are also useful herein, as well as liposomes.

[0967] The carrier suitably contains minor amounts of additives such as substances that enhance isotonicity and chemical stability. Such materials are non-toxic to recipients at the dosages and concentrations employed, and include buffers such as phosphate, citrate, succinate, acetic acid, and other organic acids or their salts; antioxidants such as ascorbic acid; low molecular weight (less than about ten residues) polypeptides, e.g., polyarginine or tripeptides; proteins, such as serum albumin, gelatin, or immunoglobulins; hydrophilic polymers such as polyvinylpyrrolidone; amino acids, such as glycine, glutamic acid, aspartic acid, or arginine; monosaccharides, disaccharides, and other carbohydrates including cellulose or its derivatives, glucose, manose, or dextrins; chelating agents such as EDTA; sugar alcohols such as mannitol or sorbitol; counterions such as sodium; and/or nonionic surfactants such as polysorbates, poloxamers, or PEG.

[0968] The Therapeutic is typically formulated in such vehicles at a concentration of about 0.1 mg/ml to 100 mg/ml, preferably 1-10 mg/ml, at a pH of about 3 to 8. It will be understood that the use of certain of the foregoing excipients, carriers, or stabilizers will result in the formation of polypeptide salts.

[0969] Any pharmaceutical used for therapeutic administration can be sterile. Sterility is readily accomplished by filtration through sterile filtration membranes (e.g., 0.2 micron membranes). Therapeutics generally are placed into a container having a sterile access port, for example, an intravenous solution bag or vial having a stopper pierceable by a hypodermic injection needle.

[0970] Therapeutics ordinarily will be stored in unit or multi-dose containers, for example, sealed ampoules or vials, as an aqueous solution or as a lyophilized formulation for reconstitution. As an example of a lyophilized formulation, 10-ml vials are filled with 5 ml of sterile-filtered 1% (w/v) aqueous Therapeutic solution, and the resulting mixture is lyophilized. The infusion solution is prepared by reconstituting the lyophilized Therapeutic using bacteriostatic Water-for-Injection.

[0971] The invention also provides a pharmaceutical pack or kit comprising one or more containers filled with one or more of the ingredients of the Therapeutics of the invention. Associated with such container(s) can be a notice in the form prescribed by a governmental agency regulating the manufacture, use or sale of pharmaceuticals or biological products, which notice reflects approval by the agency of manufacture, use or sale for human administration. In addition, the Therapeutics may be employed in conjunction with other therapeutic compounds.

[0972] The Therapeutics of the invention may be administered alone or in combination with adjuvants. Adjuvants that may be administered with the Therapeutics of the invention include, but are not limited to, alum, alum plus deoxycholate (ImmunoAg), MTP-PE (Biocine Corp.), QS21 (Genentech, Inc.), BCG (e.g., THERACYS®), MPL and nonviable prepartions of Corynebacterium parvum. In a specific embodiment, Therapeutics of the invention are administered in combination with alum. In another specific embodiment, Therapeutics of the invention are administered in combination with QS-21. Further adjuvants that may be administered with the Therapeutics of the invention include, but are not limited to, Monophosphoryl lipid immunomodulator, AdjuVax lOOa, QS-21, QS-18, CRL1005, Aluminum salts, MF-59, and Virosomal adjuvant technology. Vaccines that may be administered with the Therapeutics of the invention include, but are not limited to, vaccines directed toward protection against MMR (measles, mumps, rubella), polio, varicella, tetanus/diptheria, hepatitis A, hepatitis B, haemophilus influenzae B, whooping cough, pneumonia, influenza, Lyme's Disease, rotavirus, cholera, yellow fever, Japanese encephalitis, poliomyelitis, rabies, typhoid fever, and pertussis. Combinations may be administered either concomitantly, e.g., as an admixture, separately but simultaneously or concurrently; or sequentially. This includes presentations in which the combined agents are administered together as a therapeutic mixture, and also procedures in which the combined agents are administered separately but simultaneously, e.g., as through separate intravenous lines into the same individual. Administration “in combination” further includes the separate administration of one of the compounds or agents given first, followed by the second.

[0973] The Therapeutics of the invention may be administered alone or in combination with other therapeutic agents. Therapeutic agents that may be administered in combination with the Therapeutics of the invention include, but are not limited to, immunostimulants, immunosuppressants, antiviral agents, antiretroviral agents, anti-opportunistic infection agents, members of the TNF family, hematopoietic growth factors, antibiotics, steroidal and non-steroidal anti-inflammatories, conventional immunotherapeutic agents, chemotherapeutic agents, and cytokines and/or growth factors. Combinations may be administered either concomitantly, e.g., as an admixture, separately but simultaneously or concurrently; or sequentially. This includes presentations in which the combined agents are administered together as a therapeutic mixture, and also procedures in which the combined agents are administered separately but simultaneously, e.g., as through separate intravenous lines into the same individual. Administration “in combination” further includes the separate administration of one of the compounds or agents given first, followed by the second.

[0974] In one embodiment, the Therapeutics of the invention are administered in combination with an anticoagulant. Anticoagulants that may be administered with the compositions of the invention include, but are not limited to, heparin, low molecular weight heparin, warfarin sodium (e.g., COUMADIN(g)), dicumarol, 4-hydroxycoumarin, anisindione (e.g., MIRADON™), acenocoumarol (e.g., nicoumalone, SINTHROME™), indan-1,3-dione, phenprocoumon (e.g., MARCUMAR™), ethyl biscoumacetate (e.g., TROMEXAN™), and aspirin. In a specific embodiment, compositions of the invention are administered in combination with heparin and/or warfarin. In another specific embodiment, compositions of the invention are administered in combination with warfarin. In another specific embodiment, compositions of the invention are administered in combination with warfarin and aspirin. In another specific embodiment, compositions of the invention are administered in combination with heparin. In another specific embodiment, compositions of the invention are administered in combination with heparin and aspirin.

[0975] In another embodiment, the Therapeutics of the invention are administered in combination with thrombolytic drugs. Thrombolytic drugs that may be administered with the compositions of the invention include, but are not limited to, plasminogen, lys-plasminogen, alpha2-antiplasmin, streptokinae (e.g., KABIKINASE™), antiresplace (e.g., EMINASE™), tissue plasminogen activator (t-PA, altevase, ACTIVASE™), urokinase (e.g., ABBOKINASE™), sauruplase, (Prourokinase, single chain urokinase), and aminocaproic acid (e.g., AMICAR™). In a specific embodiment, compositions of the invention are administered in combination with tissue plasminogen activator and aspirin.

[0976] In another embodiment, the Therapeutics of the invention are administered in combination with antiplatelet drugs. Antiplatelet drugs that may be administered with the compositions of the invention include, but are not limited to, aspirin, dipyridamole (e.g., PERSANTINE™), and ticlopidine (e.g., TICLID™).

[0977] In specific embodiments, the use of anti-coagulants, thrombolytic and/or antiplatelet drugs in combination with Therapeutics of the invention is contemplated for the prevention, diagnosis, and/or treatment of thrombosis, arterial thrombosis, venous thrombosis, thromboembolism, pulmonary embolism, atherosclerosis, myocardial infarction, transient ischemic attack, unstable angina. In specific embodiments, the use of anticoagulants, thrombolytic drugs and/or antiplatelet drugs in combination with Therapeutics of the invention is contemplated for the prevention of occulsion of saphenous grafts, for reducing the risk of periprocedural thrombosis as might accompany angioplasty procedures, for reducing the risk of stroke in patients with atrial fibrillation including nonrheumatic atrial fibrillation, for reducing the risk of embolism associated with mechanical heart valves and or mitral valves disease. Other uses for the therapeutics of the invention, alone or in combination with antiplatelet, anticoagulant, and/or thrombolytic drugs, include, but are not limited to, the prevention of occlusions in extracorporeal devices (e.g., intravascular canulas, vascular access shunts in hemodialysis patients, hemodialysis machines, and cardiopulmonary bypass machines).

[0978] In certain embodiments, Therapeutics of the invention are administered in combination with antiretroviral agents, nucleoside/nucleotide reverse transcriptase inhibitors (NRTIs), non-nucleoside reverse transcriptase inhibitors (NNRTIs), and/or protease inhibitors (PIs). NRTIs that may be administered in combination with the Therapeutics of the invention, include, but are not limited to, RETROVIR™ (zidovudine/AZT), VIDEX™ (didanosine/ddI), HIVID™ (zalcitabine/ddC), ZERIT™ (stavudine/d4T), EPIVIR™ (lamivudine/3TC), and COMBIVIR™ (zidovudine/lamivudine). NNRTIs that may be administered in combination with the Therapeutics of the invention, include, but are not limited to, VIRAMUNE™ (nevirapine), RESCRIPTOR™ (delavirdine), and SUSTIVA™ (efavirenz). Protease inhibitors that may be administered in combination with the Therapeutics of the invention, include, but are not limited to, CRIXIVAN™ (indinavir), NORVIR™ (ritonavir), INVIRASE™ (saquinavir), and VIRACEPT™ (nelfinavir). In a specific embodiment, antiretroviral agents, nucleoside reverse transcriptase inhibitors, non-nucleoside reverse transcriptase inhibitors, and/or protease inhibitors may be used in any combination with Therapeutics of the invention to treat AIDS and/or to prevent or treat HIV infection.

[0979] Additional NRTIs include LODENOSINE™ (F-ddA; an acid-stable adenosine NRTI; Triangle/Abbott; COVIRACIL™ (emtricitabine/FTC; structurally related to lamivudine (3TC) but with 3- to 10-fold greater activity in vitro; Triangle/Abbott); dOTC (BCH-10652, also structurally related to lamivudine but retains activity against a substantial proportion of lamivudine-resistant isolates; Biochem Pharma); Adefovir (refused approval for anti-HIV therapy by FDA; Gilead Sciences); PREVEON® (Adefovir Dipivoxil, the active prodrug of adefovir; its active form is PMEA-pp); TENOFOVIR™ (bis-POC PMPA, a PMPA prodrug; Gilead); DAPD/DXG (active metabolite of DAPD; Triangle/Abbott); D-D4FC (related to 3TC, with activity against AZT/3TC-resistant virus); GW420867X (Glaxo Wellcome); ZIAGEN™ (abacavir/159U89; Glaxo Wellcome Inc.); CS-87 (3′azido-2′,3′-dideoxyuridine; WO 99/66936); and S-acyl-2-thioethyl (SATE)-bearing prodrug forms of β-L-FD4C and β-L-FddC (WO 98/17281).

[0980] Additional NNRTIs include COACTINON™ (Emivirine/MKC-442, potent NNRTI of the HEPT class; Triangle/Abbott); CAPRAVIRINE™ (AG-1549/S-1153, a next generation NNRTI with activity against viruses containing the K103N mutation; Agouron); PNU-142721 (has 20- to 50-fold greater activity than its predecessor delavirdine and is active against K103N mutants; Pharmacia & Upjohn); DPC-961 and DPC-963 (second-generation derivatives of efavirenz, designed to be active against viruses with the K103N mutation; DuPont); GW-420867×(has 25-fold greater activity than HBY097 and is active against K103N mutants; Glaxo Weilcome); CALANOLIDE A (naturally occurring agent from the latex tree; active against viruses containing either or both the Y181C and K103N mutations); and Propolis (WO 99/49830).

[0981] Additional protease inhibitors include LOPINAVIR™, (ABT378/r; Abbott Laboratories); BMS-232632 (an azapeptide; Bristol-Myres Squibb); TIPRANAVIR™ (PNU-140690, a non-peptic dihydropyrone; Pharmacia & Upjohn); PD-178390 (a nonpeptidic dihydropyrone; Parke-Davis); BMS 232632 (an azapeptide; Bristol-Myers Squibb); L-756,423 (an indinavir analog; Merck); DMP-450 (a cyclic urea compound; Avid & DuPont); AG-1776 (a peptidomimetic with in vitro activity against protease inhibitor-resistant viruses; Agouron); VX-175/GW-433908 (phosphate prodrug of amprenavir; Vertex & Glaxo Welcome); CGP61755 (Ciba); and AGENERASE™ (amprenavir; Glaxo Wellcome Inc.).

[0982] Additional antiretroviral agents include fusion inhibitors/gp41 binders. Fusion inhibitors/gp4l binders include T-20 (a peptide from residues 643-678 of the HIV gp41 transmembrane protein ectodomain which binds to gp41 in its resting state and prevents transformation to the fusogenic state; Trimeris) and T-1249 (a second-generation fusion inhibitor; Trimeris).

[0983] Additional antiretroviral agents include fusion inhibitors/chemokine receptor antagonists. Fusion inhibitors/chemokine receptor antagonists include CXCR4 antagonists such as AMD 3100 (a bicyclam), SDF-1 and its analogs, and ALX40-4C (a cationic peptide), T22 (an 18 amino acid peptide; Trimeris) and the T22 analogs T134 and T140; CCR5 antagonists such as RANTES (9-68), AOP-RANTES, NNY-RANTES, and TAK-779; and CCR5/CXCR4 antagonists such as NSC 651016 (a distamycin analog). Also included are CCR2B, CCR3, and CCR6 antagonists. Chemokine recpetor agonists such as RANTES, SDF-1, MIP-1α, MIP-1β, etc., may also inhibit fusion.

[0984] Additional antiretroviral agents include integrase inhibitors. Integrase inhibitors include dicaffeoylquinic (DFQA) acids; L-chicoric acid (a dicaffeoyltartaric (DCTA) acid); quinalizarin (QLC) and related anthraquinones; ZINTEVIR™ (AR 177, an oligonucleotide that probably acts at cell surface rather than being a true integrase inhibitor; Arondex); and naphthols such as those disclosed in WO 98/50347.

[0985] Additional antiretroviral agents include hydroxyurea-like compunds such as BCX-34 (a purine nucleoside phosphorylase inhibitor; Biocryst); ribonucleotide reductase inhibitors such as DIDOX™ (Molecules for Health); inosine monophosphate dehydrogenase (IMPDH) inhibitors sucha as VX-497 (Vertex); and mycopholic acids such as CellCept (mycophenolate mofetil; Roche).

[0986] Additional antiretroviral agents include inhibitors of viral integrase, inhibitors of viral genome nuclear translocation such as arylene bis(methylketone) compounds; inhibitors of HIV entry such as AOP-RANTES, NNY-RANTES, RANTES-IgG fusion protein, soluble complexes of RANTES and glycosaminoglycans (GAG), and AMD-3100; nucleocapsid zinc finger inhibitors such as dithiane compounds; targets of HIV Tat and Rev; and pharmacoenhancers such as ABT-378.

[0987] Other antiretroviral therapies and adjunct therapies include cytokines and lymphokines such as MIP-1α, MIP-1β, SDF-1α, IL-2, PROLEUKIN™ (aldesleukin/L2-7001; Chiron), IL-4, IL-10, IL-12, and IL-13; interferons such as IFN-α2a; antagonists of TNFs, NFκcB, GM-CSF, M-CSF, and IL-10; agents that modulate immune activation such as cyclosporin and prednisone; vaccines such as Remune™ (HIV Immunogen), APL 400-003 (Apollon), recombinant gp120 and fragments, bivalent (B/E) recombinant envelope glycoprotein, rgp120CM235, MN rgp120, SF-2 rgp120, gp120/soluble CD4 complex, Delta JR-FL protein, branched synthetic peptide derived from discontinuous gp120 C3/C4 domain, fusion-competent immunogens, and Gag, Pol, Nef, and Tat vaccines; gene-based therapies such as genetic suppressor elements (GSEs; WO 98/54366), and intrakines (genetically modified CC chemokines targetted to the ER to block surface expression of newly synthesized CCR5 (Yang et al., PNAS 94:11567-72 (1997); Chen et al., Nat. Med. 3:1110-16 (1997)); antibodies such as the anti-CXCR4 antibody 12G5, the anti-CCR5 antibodies 2D7, 5C7, PA8, PA9, PA10, PA11, PA12, and PA14, the anti-CD4 antibodies Q4120 and RPA-T4, the anti-CCR3 antibody 7B11, the anti-gp120 antibodies 17b, 48d, 447-52D, 257-D, 268-D and 50.1, anti-Tat antibodies, anti-TNF-α antibodies, and monoclonal antibody 33A; aryl hydrocarbon (AH) receptor agonists and antagonists such as TCDD, 3,3′,4,4′,5-pentachlorobiphenyl, 3,3′,4,4′-tetrachlorobiphenyl, and α-naphthoflavone (WO 98/30213); and antioxidants such as γ-L-glutamyl-L-cysteine ethyl ester (γ-GCE; WO 99/56764).

[0988] In a further embodiment, the Therapeutics of the invention are administered in combination with an antiviral agent. Antiviral agents that may be administered with the Therapeutics of the invention include, but are not limited to, acyclovir, ribavirin, amantadine, and remantidine.

[0989] In other embodiments, Therapeutics of the invention may be administered in combination with anti-opportunistic infection agents. Anti-opportunistic agents that may be administered in combination with the Therapeutics of the invention, include, but are not limited to, TRIMETHOPRIM-SULFAMETHOXAZOLE™, DAPSONE™, PENTAMIDINE™, ATOVAQUONE™, ISONIAZID™, RIFAMPIN™, PYRAZINAMIDE™, ETHAMBUTOL™, RIFABUTIN™, CLARITHROMYCIN™, AZITHROMYCIN™, GANCICLOVIR™, FOSCARNET™, CIDOFOVIR™, FLUCONAZOLE™, ITRACONAZOLE™, KETOCONAZOLE™, ACYCLOVIR™, FAMCICOLVIR™, PYRIMETHAMINE™, LEUCOVORIN™, NEUPOGEN™ (filgrastim/G-CSF), and LEUKINE” (sargramostim/GM-CSF). In a specific embodiment, Therapeutics of the invention are used in any combination with TRIMETHOPRIM-SULFAMETHOXAZOLE™, DAPSONE™, PENTAMIDINE™, and/or ATOVAQUONE™ to prophylactically treat or prevent an opportunistic Pneumocystis carinii pneumonia infection. In another specific embodiment, Therapeutics of the invention are used in any combination with ISONIAZID™, RIFAMPIN™, PYRAZINAMIDE™, and/or ETHAMBUTOL™ to prophylactically treat or prevent an opportunistic Mycobacterium avium complex infection. In another specific embodiment, Therapeutics of the invention are used in any combination with RIFABUTIN™, CLARITHROMYCIN™, and/or AZITHROMYCIN™ to prophylactically treat or prevent an opportunistic Mycobacterium tuberculosis infection. In another specific embodiment, Therapeutics of the invention are used in any combination with GANCICLOVIR™, FOSCARNET™, and/or CIDOFOVIR™ to prophylactically treat or prevent an opportunistic cytomegalovirus infection. In another specific embodiment, Therapeutics of the invention are used in any combination with FLUCONAZOLE™, ITRACONAZOLE™, and/or KETOCONAZOLE™ to prophylactically treat or prevent an opportunistic fungal infection. In another specific embodiment, Therapeutics of the invention are used in any combination with ACYCLOVIR™ and/or FAMCICOLVIR™ to prophylactically treat or prevent an opportunistic herpes simplex virus type I and/or type II infection. In another specific embodiment, Therapeutics of the invention are used in any combination with PYRIMETHAMINE™ and/or LEUCOVORIN™ to prophylactically treat or prevent an opportunistic Toxoplasma gondii infection. In another specific embodiment, Therapeutics of the invention are used in any combination with LEUCOVORIN™ and/or NEUPOGEN™, to prophylactically treat or prevent an opportunistic bacterial infection.

[0990] In a further embodiment, the Therapeutics of the invention are administered in combination with an antibiotic agent. Antibiotic agents that may be administered with the Therapeutics of the invention include, but are not limited to, amoxicillin, beta-lactamases, aminoglycosides, beta-lactam (glycopeptide), beta-lactamases, Clindamycin, chloramphenicol, cephalosporins, ciprofloxacin, erythromycin, fluoroquinolones, macrolides, metronidazole, penicillins, quinolones, rapamycin, rifampin, streptomycin, sulfonamide, tetracyclines, trimethoprim, trimethoprim-sulfamethoxazole, and vancomycin.

[0991] In other embodiments, the Therapeutics of the invention are administered in combination with immunestimulants. Immunostimulants that may be administered in combination with the Therapeutics of the invention include, but are not limited to, levamisole (e.g., ERGAMISOL™), isoprinosine (e.g. INOSIPLEX™), interferons (e.g. interferon alpha), and interleukins (e.g., IL-2).

[0992] In other embodiments, Therapeutics of the invention are administered in combination with immunosuppressive agents. Immunosuppressive agents that may be administered in combination with the Therapeutics of the invention include, but are not limited to, steroids, cyclosporine, cyclosporine analogs, cyclophosphamide methylprednisone, prednisone, azathioprine, FK-506, 15-deoxyspergualin, and other immunosuppressive agents that act by suppressing the function of responding T cells. Other immunosuppressive agents that may be administered in combination with the Therapeutics of the invention include, but are not limited to, prednisolone, methotrexate, thalidomide, methoxsalen, rapamycin, leflunomide, mizoribine (BREDININ™), brequinar, deoxyspergualin, and azaspirane (SKF 105685), ORTHOCLONE OKT® 3 (muromonab-CD3), SANDIMMUNE™, NEORAL™, SANGDYA™ (cyclosporine), PROGRAF® (FK506, tacrolimus), CELLCEPT® (mycophenolate motefil, of which the active metabolite is mycophenolic acid), IMURAN™ (azathioprine), glucocorticosteroids, adrenocortical steroids such as DELTASONE™ (prednisone) and HYDELTRASOL™ (prednisolone), FOLEX™ and MEXATE™ (methotrxate), OXSORALEN-ULTRA™ (methoxsalen) and RAPAMUNE™ (sirolimus). In a specific embodiment, immunosuppressants may be used to prevent rejection of organ or bone marrow transplantation.

[0993] In an additional embodiment, Therapeutics of the invention are administered alone or in combination with one or more intravenous immune globulin preparations. Intravenous immune globulin preparations that may be administered with the Therapeutics of the invention include, but not limited to, GAMMAR™, IVEEGAM™, SANDOGLOBULIN™, GAMMAGARD S/D™, ATGAM™ (antithymocyte glubulin), and GAMIMUNE™. In a specific embodiment, Therapeutics of the invention are administered in combination with intravenous immune globulin preparations in transplantation therapy (e.g., bone marrow transplant).

[0994] In certain embodiments, the Therapeutics of the invention are administered alone or in combination with an anti-inflammatory agent. Anti-inflammatory agents that may be administered with the Therapeutics of the invention include, but are not limited to, corticosteroids (e.g. betamethasone, budesonide, cortisone, dexamethasone, hydrocortisone, methylprednisolone, prednisolone, prednisone, and triamcinotone), nonsteroidal anti-inflammatory drugs (e.g., diclofenac, diflunisal, etodolac, fenoprofen, floctafenine, flurbiprofen, ibuprofen, indomethacin, ketoprofen, meclofenamate, mefenamic acid, meloxicam, nabumetone, naproxen, oxaprozin, phenylbutazone, piroxicam, sulindac, tenoxicam, tiaprofenic acid, and tolmetin.), as well as antihistamines, aminoarylcarboxylic acid derivatives, arylacetic acid derivatives, arylbutyric acid derivatives, arylcarboxylic acids, arylpropionic acid derivatives, pyrazoles, pyrazolones, salicylic acid derivatives, thiazinecarboxamides, e-acetamidocaproic acid, S-adenosylmethionine, 3-amino-4-hydroxybutyric acid, amixetrine, bendazac, benzydamine, bucolome, difenpiramide, ditazol, emorfazone, guaiazulene, nabumetone, nimesulide, orgotein, oxaceprol, paranyline, perisoxal, pifoxime, proquazone, proxazole, and tenidap.

[0995] In an additional embodiment, the compositions of the invention are administered alone or in combination with an anti-angiogenic agent. Anti-angiogenic agents that may be administered with the compositions of the invention include, but are not limited to, Angiostatin (Entremed, Rockville, Md.), Troponin-1 (Boston Life Sciences, Boston, Mass.), anti-Invasive Factor, retinoic acid and derivatives thereof, paclitaxel (Taxol), Suramin, Tissue Inhibitor of Metalloproteinase-1, Tissue Inhibitor of Metalloproteinase-2, VEGI, Plasminogen Activator Inhibitor-1, Plasminogen Activator Inhibitor-2, and various forms of the lighter “d group” transition metals.

[0996] Lighter “d group” transition metals include, for example, vanadium, molybdenum, tungsten, titanium, niobium, and tantalum species. Such transition metal species may form transition metal complexes. Suitable complexes of the above-mentioned transition metal species include oxo transition metal complexes.

[0997] Representative examples of vanadium complexes include oxo vanadium complexes such as vanadate and vanadyl complexes. Suitable vanadate complexes include metavanadate and orthovanadate complexes such as, for example, ammonium metavanadate, sodium metavanadate, and sodium orthovanadate. Suitable vanadyl complexes include, for example, vanadyl acetylacetonate and vanadyl sulfate including vanadyl sulfate hydrates such as vanadyl sulfate mono- and trihydrates.

[0998] Representative examples of tungsten and molybdenum complexes also include oxo complexes. Suitable oxo tungsten complexes include tungstate and tungsten oxide complexes. Suitable tungstate complexes include ammonium tungstate, calcium tungstate, sodium tungstate dihydrate, and tungstic acid. Suitable tungsten oxides include tungsten (IV) oxide and tungsten (VI) oxide. Suitable oxo molybdenum complexes include molybdate, molybdenum oxide, and molybdenyl complexes. Suitable molybdate complexes include ammonium molybdate and its hydrates, sodium molybdate and its hydrates, and potassium molybdate and its hydrates. Suitable molybdenum oxides include molybdenum (VI) oxide, molybdenum (VT) oxide, and molybdic acid. Suitable molybdenyl complexes include, for example, molybdenyl acetylacetonate. Other suitable tungsten and molybdenum complexes include hydroxo derivatives derived from, for example, glycerol, tartaric acid, and sugars.

[0999] A wide variety of other anti-angiogenic factors may also be utilized within the context of the present invention. Representative examples include, but are not limited to, platelet factor 4; protamine sulphate; sulphated chitin derivatives (prepared from queen crab shells), (Murata et al., Cancer Res. 51:22-26, (1991)); Sulphated Polysaccharide Peptidoglycan Complex (SP-PG) (the function of this compound may be enhanced by the presence of steroids such as estrogen, and tamoxifen citrate); Staurosporine; modulators of matrix metabolism, including for example, proline analogs, cishydroxyproline, d,L-3,4-dehydroproline, Thiaproline, alpha,alpha-dipyridyl, aminopropionitrile fumarate; 4-propyl-5-(4-pyridinyl)-2(3H)-oxazolone; Methotrexate; Mitoxantrone; Heparin; Interferons; 2 Macroglobulin-serum; CbIMP-3 (Pavloff et al., J. Bio. Chem. 267:17321-17326, (1992)); Chymostatin (Tomkinson et al., Biochem J. 286:475-480, (1992)); Cyclodextrin Tetradecasulfate; Eponemycin; Camptothecin; Fumagillin (Ingber et al., Nature 348:555-557, (1990)); Gold Sodium Thiomalate (“GST”; Matsubara and Ziff, J. Clin. Invest. 79: 1440-1446, (1987)); anticollagenase-serum; alpha2-antiplasmin (Holmes et al., J. Biol. Chem. 262(4):1659-1664, (1987)); Bisantrene (National Cancer Institute); Lobenzarit disodium (N-(2)-carboxyphenyl-4-chloroanthronilic acid disodium or “CCA”; (Takeuchi et al., Agents Actions 36:312-316, (1992)); and metalloproteinase inhibitors such as BB94.

[1000] Additional anti-angiogenic factors that may also be utilized within the context of the present invention include Thalidomide, (Celgene, Warren, N.J.); Angiostatic steroid; AGM-1470 (H. Brem and J. Folkman J Pediatr. Surg. 28:445-51 (1993)); an integrin alpha v beta 3 antagonist (C. Storgard et al., J. Clin. Invest. 103:47-54 (1999)); carboxynaminolmidazole; Carboxyamidotriazole (CAI) (National Cancer Institute, Bethesda, Md.); Conbretastatin A-4 (CA4P) (OXiGENE, Boston, Mass.); Squalamine (Magainin Pharmaceuticals, Plymouth Meeting, Pa.); TNP-470, (Tap Pharmaceuticals, Deerfield, Ill.); ZD-0101 AstraZeneca (London, UK); APRA (CT2584); Benefin, Byrostatin-1 (SC339555); CGP-41251 (PKC 412); CMIO1; Dexrazoxane (ICRF187); DMXAA; Endostatin; Flavopridiol; Genestein; GTE; ImmTher; Iressa (ZD1839); Octreotide (Somatostatin); Panretin; Penacillamine; Photopoint; PI-88; Prinomastat (AG-3340) Purlytin; Suradista (FCE26644); Tamoxifen (Nolvadex); Tazarotene; Tetrathiomolybdate; Xeloda (Capecitabine); and 5-Fluorouracil.

[1001] Anti-angiogenic agents that may be administed in combination with the compounds of the invention may work through a variety of mechanisms including, but not limited to, inhibiting proteolysis of the extracellular matrix, blocking the function of endothelial cell-extracellular matrix adhesion molecules, by antagonizing the function of angiogenesis inducers such as growth factors, and inhibiting integrin receptors expressed on proliferating endothelial cells. Examples of anti-angiogenic inhibitors that interfere with extracellular matrix proteolysis and which may be administered in combination with the compositons of the invention include, but are not Imited to, AG-3340 (Agouron, La Jolla, Calif.), BAY-12-9566 (Bayer, West Haven, Conn.), BMS-275291 (Bristol Myers Squibb, Princeton, N.J.), CGS-27032A (Novartis, East Hanover, N.J.), Marimastat (British Biotech, Oxford, UK), and Metastat (Aeterna, St-Foy, Quebec). Examples of anti-angiogenic inhibitors that act by blocking the function of endothelial cell-extracellular matrix adhesion molecules and which may be administered in combination with the compositons of the invention include, but are not Imited to, EMD-121'974 (Merck KcgaA Darmstadt, Germany) and Vitaxin (Ixsys, La Jolla, Calif./Medimmune, Gaithersburg, Md.). Examples of anti-angiogenic agents that act by directly antagonizing or inhibiting angiogenesis inducers and which may be administered in combination with the compositons of the invention include, but are not Imited to, Angiozyme (Ribozyme, Boulder, Colo.), Anti-VEGF antibody (Genentech, S. San Francisco, Calif.), PTK-787/ZK-225846 (Novartis, Basel, Switzerland), SU-101 (Sugen, S. San Francisco, Calif.), SU-5416 (Sugen/Pharmacia Upjohn, Bridgewater, N.J.), and SU-6668 (Sugen). Other anti-angiogenic agents act to indirectly inhibit angiogenesis. Examples of indirect inhibitors of angiogenesis which may be administered in combination with the compositons of the invention include, but are not limited to, IM-862 (Cytran, Kirkland, Wash.), Interferon-alpha, IL-12 (Roche, Nutley, N.J.), and Pentosan polysulfate (Georgetown University, Washington, D.C.).

[1002] In particular embodiments, the use of compositions of the invention in combination with anti-angiogenic agents is contemplated for the treatment, prevention, and/or amelioration of an autoimmune disease, such as for example, an autoimmune disease described herein.

[1003] In a particular embodiment, the use of compositions of the invention in combination with anti-angiogenic agents is contemplated for the treatment, prevention, and/or amelioration of arthritis. In a more particular embodiment, the use of compositions of the invention in combination with anti-angiogenic agents is contemplated for the treatment, prevention, and/or amelioration of rheumatoid arthritis.

[1004] In another embodiment, the polynucleotides encoding a polypeptide of the present invention are administered in combination with an angiogenic protein, or polynucleotides encoding an angiogenic protein. Examples of angiogenic proteins that may be administered with the compositions of the invention include, but are not limited to, aidic and basic fibroblast growth factors, VEGF-1, VEGF-2, VEGF-3, epidermal growth factor alpha and beta, platelet-derived endothelial cell growth factor, platelet-derived growth factor, tumor necrosis factor alpha, hepatocyte growth factor, insulin-like growth factor, colony stimulating factor, macrophage colony stimulating factor, granulocyte/macrophage colony stimulating factor, and nitric oxide synthase.

[1005] In additional embodiments, compositions of the invention are administered in combination with a chemotherapeutic agent. Chemotherapeutic agents that may be administered with the Therapeutics of the invention include, but are not limited to alkylating agents such as nitrogen mustards (for example, Mechlorethamine, cyclophosphamide, Cyclophosphamide Ifosfamide, Melphalan (L-sarcolysin), and Chlorambucil), ethylenimines and methylmelamines (for example, Hexamethylmelamine and Thiotepa), alkyl sulfonates (for example, Busulfan), nitrosoureas (for example, Carmustine (BCNU), Lomustine (CCNU), Semustine (methyl-CCNU), and Streptozocin (streptozotocin)), triazenes (for example, Dacarbazine (DTIC; dimethyltriazenoimidazolecarboxamide)), folic acid analogs (for example, Methotrexate (amethopterin)), pyrimidine analog,s (for example, Fluorouacil (5-fluorouracil; 5-FU), Floxuridine (fluorodeoxyuridine; FudR), and Cytarabine (cytosine arabinoside)), purine analogs and related inhibitors (for example, Mercaptopurine (6-mercaptopurine; 6-MP), Thioguanine (6-thioguanine; TG), and Pentostatin (2′-deoxycoformycin)), vinca alkaloids (for example, Vinblastine (VLB, vinblastine sulfate)) and Vincristine (vincristine sulfate)), epipodophyllotoxins (for example, Etoposide and Teniposide), antibiotics (for example, Dactinomycin (actinomycin D), Daunorubicin (daunomycin; rubidomycin), Doxorubicin, Bleomycin, Plicamycin (mithramycin), and Mitomycin (mitomycin C), enzymes (for example, L-Asparaginase), biological response modifiers (for example, Interferon-alpha and interferon-alpha-2b), platinum coordination compounds (for example, Cisplatin (cis-DDP) and Carboplatin), anthracenedione (Mitoxantrone), substituted ureas (for example, Hydroxyurea), methylhydrazine derivatives (for example, Procarbazine (N-methylhydrazine; M1H), adrenocorticosteroids (for example, Prednisone), progestins (for example, Hydroxyprogesterone caproate, Medroxyprogesterone, Medroxyprogesterone acetate, and Megestrol acetate), estrogens (for example, Diethylstilbestrol (DES), Diethylstilbestrol diphosphate, Estradiol, and Ethinyl estradiol), antiestrogens (for example, Tamoxifen), androgens (Testosterone proprionate, and Fluoxymesterone), antiandrogens (for example, Flutamide), gonadotropin-releasing horomone analogs (for example, Leuprolide), other hormones and hormone analogs (for example, methyltestosterone, estramustine, estramustine phosphate sodium, chlorotrianisene, and testolactone), and others (for example, dicarbazine, glutamic acid, and mitotane).

[1006] In one embodiment, the compositions of the invention are administered in combination with one or more of the following drugs: infliximab (also known as Remicade™ Centocor, Inc.), Trocade (Roche, RO-32-3555), Leflunomide (also known as Arava™ from Hoechst Marion Roussel), Kineret™ (an IL-1 Receptor antagonist also known as Anakinra from Amgen, Inc.)

[1007] In a specific embodiment, compositions of the invention are administered in combination with CHOP (cyclophosphamide, doxorubicin, vincristine, and prednisone) or combination of one or more of the components of CHOP. In one embodiment, the compositions of the invention are administered in combination with anti-CD20 antibodies, human monoclonal anti-CD20 antibodies. In another embodiment, the compositions of the invention are administered in combination with anti-CD20 antibodies and CHOP, or anti-CD20 antibodies and any combination of one or more of the components of CHOP, particularly cyclophosphamide and/or prednisone. In a specific embodiment, compositions of the invention are administered in combination with Rituximab. In a further embodiment, compositions of the invention are administered with Rituximab and CHOP, or Rituximab and any combination of one or more of the components of CHOP, particularly cyclophosphamide and/or prednisone. In a specific embodiment, compositions of the invention are administered in combination with tositumomab. In a further embodiment, compositions of the invention are administered with tositumomab and CHOP, or tositumomab and any combination of one or more of the components of CHOP, particularly cyclophosphamide and/or prednisone. The anti-CD20 antibodies may optionally be associated with radioisotopes, toxins or cytotoxic prodrugs.

[1008] In another specific embodiment, the compositions of the invention are administered in combination Zevalin™. In a further embodiment, compositions of the invention are administered with Zevalin™ and CHOP, or Zevalin™ and any combination of one or more of the components of CHOP, particularly cyclophosphamide and/or prednisone. Zevalin™ may be associated with one or more radisotopes. Particularly preferred isotopes are ⁹⁰Y and ¹¹¹In.

[1009] In an additional embodiment, the Therapeutics of the invention are administered in combination with cytokines. Cytokines that may be administered with the Therapeutics of the invention include, but are not limited to, IL2, IL3, IL4, IL5, IL6, IL7, IL10, IL12, IL13, IL15, anti-CD40, CD40L, IFN-gamma and TNF-alpha. In another embodiment, Therapeutics of the invention may be administered with any interleukin, including, but not limited to, IL-1alpha, IL-1beta, IL-2, IL-3, IL-4, IL-S, IL-6, IL-7, IL-8, IL-9, IL-10, IL-1, IL-12, IL-13, IL-14, IL-15, IL-16, IL-17, IL-18, IL-19, IL-20, and IL-21.

[1010] In one embodiment, the Therapeutics of the invention are administered in combination with members of the TNF family. TNF, TNF-related or TNF-like molecules that may be administered with the Therapeutics of the invention include, but are not limited to, soluble forms of TNF-alpha, lymphotoxin-alpha (LT-alpha, also known as TNF-beta), LT-beta (found in complex heterotrimer LT-alpha2-beta), OPGL, FasL, CD27L, CD30L, CD40L, 4-1BBL, DcR3, OX40L, TNF-gamma (International Publication No. WO 96/14328), AIM-I (International Publication No. WO 97/33899), endokine-alpha (International Publication No. WO 98/07880), OPG, and neutrokine-alpha (International Publication No. WO 98/18921, OX40, and nerve growth factor (NGF), and soluble forms of Fas, CD30, CD27, CD40 and 4-IBB, TR2 (International Publication No. WO 96/34095), DR3 (International Publication No. WO 97/33904), DR4 (International Publication No. WO 98/32856), TR5 (International Publication No. WO 98/30693), TRANK, TR9 (International Publication No. WO 98/56892),TR10 (International Publication No. WO 98/54202), 312C2 (International Publication No. WO 98/06842), and TR12, and soluble forms CD154, CD70, and CD153.

[1011] In an additional embodiment, the Therapeutics of the invention are administered in combination with angiogenic proteins. Angiogenic proteins that may be administered with the Therapeutics of the invention include, but are not limited to, Glioma Derived Growth Factor (GDGF), as disclosed in European Patent Number EP-399816; Platelet Derived Growth Factor-A (PDGF-A), as disclosed in European Patent Number EP-6821 10; Platelet Derived Growth Factor-B (PDGF-B), as disclosed in European Patent Number EP-282317; Placental Growth Factor (PIGF), as disclosed in International Publication Number WO 92/06194; Placental Growth Factor-2 (PIGF-2), as disclosed in Hauser et al., Growth Factors, 4:259-268 (1993); Vascular Endothelial Growth Factor (VEGF), as disclosed in International Publication Number WO 90/13649; Vascular Endothelial Growth Factor-A (VEGF-A), as disclosed in European Patent Number EP-506477; Vascular Endothelial Growth Factor-2 (VEGF-2), as disclosed in International Publication Number WO 96/39515; Vascular Endothelial Growth Factor B (VEGF-3); Vascular Endothelial Growth Factor B-186 (VEGF-B186), as disclosed in International Publication Number WO 96/26736; Vascular Endothelial Growth Factor-D (VEGF-D), as disclosed in International Publication Number WO 98/02543; Vascular Endothelial Growth Factor-D (VEGF-D), as disclosed in International Publication Number WO 98/07832; and Vascular Endothelial Growth Factor-E (VEGF-E), as disclosed in German Patent Number DE19639601. The above mentioned references are herein incorporated by reference in their entireties.

[1012] In an additional embodiment, the Therapeutics of the invention are administered in combination with Fibroblast Growth Factors. Fibroblast Growth Factors that may be administered with the Therapeutics of the invention include, but are not limited to, FGF-1, FGF-2, FGF-3, FGF-4, FGF-5, FGF-6, FGF-7, FGF-8, FGF-9, FGF-10, FGF-11, FGF-12, FGF-13, FGF-14, and FGF-15.

[1013] In an additional embodiment, the Therapeutics of the invention are administered in combination with hematopoietic growth factors. Hematopoietic growth factors that may be administered with the Therapeutics of the invention include, but are not limited to, granulocyte macrophage colony stimulating factor (GM-CSF) (sargramostim, LEUKINE™, PROKINET™), granulocyte colony stimulating factor (G-CSF) (filgrastim, NEUPOGEN™), macrophage colony stimulating factor (M-CSF, CSF-1) erythropoietin (epoetin alfa, EPOGEN™, PROCRIT™), stem cell factor (SCF, c-kit ligand, steel factor), megakaryocyte colony stimulating factor, PIXY321 (a GMCSF/IL-3 fusion protein), interleukins, especially any one or more of IL-1 through IL-12, interferon-gamma, or thrombopoietin.

[1014] In certain embodiments, Therapeutics of the present invention are administered in combination with adrenergic blockers, such as, for example, acebutolol, atenolol, betaxolol, bisoprolol, carteolol, labetalol, metoprolol, nadolol, oxprenolol, penbutolol, pindolol, propranolol, sotalol, and timolol.

[1015] In another embodiment, the Therapeutics of the invention are administered in combination with an antiarrhythmic drug (e.g., adenosine, amidoarone, bretylium, digitalis, digoxin, digitoxin, diliazem, disopyramide, esmolol, flecainide, lidocaine, mexiletine, moricizine, phenytoin, procainamide, N-acetyl procainamide, propafenone, propranolol, quinidine, sotalol, tocainide, and verapamil).

[1016] In another embodiment, the Therapeutics of the invention are administered in combination with diuretic agents, such as carbonic anhydrase-inhibiting agents (e.g., acetazolamide, dichlorphenamide, and methazolamide), osmotic diuretics (e.g., glycerin, isosorbide, mannitol, and urea), diuretics that inhibit Na⁺-K⁺-2Cl⁻ symport (e.g., furosemide, bumetamide, azosemide, piretamide, tripamide, ethacrynic acid, muzolimine, and torsemide), thiazide and thiazide-like diuretics (e.g., bendroflumethiazide, benzthiazide, chlorothiazide, hydrochlorothiazide, hydroflumethiazide, methyclothiazide, polythiazide, trichormethiazide, chlorthalidone, indapamide, metolazone, and quinethazone), potassium sparing diuretics (e.g., amiloride and triamterene), and mineralcorticoid receptor antagonists (e.g., spironolactone, canrenone, and potassium canrenoate).

[1017] In one embodiment, the Therapeutics of the invention are administered in combination with treatments for endocrine and/or hormone imbalance disorders. Treatments for endocrine and/or hormone imbalance disorders include, but are not limited to, ¹²⁷I, radioactive isotopes of iodine such as ¹³¹I and ¹²³I; recombinant growth hormone, such as HUMATROPE™ (recombinant somatropin); growth hormone analogs such as PROTROPIN™ (somatrem); dopamine agonists such as PARLODEL™ (bromocriptine); somatostatin analogs such as SANDOSTATIN™ (octreotide); gonadotropin preparations such as PREGNYL™, A.P.L.™ and PROFASI™ (chorionic gonadotropin (CG)), PERGONAL™ (menotropins), and METRODIN™ (urofollitropin (uFSH)); synthetic human gonadotropin releasing hormone preparations such as FACTREL™ and LUTREPULSE™ (gonadorelin hydrochloride); synthetic gonadotropin agonists such as LUPRON™ (leuprolide acetate), SUPPRELIN™ (histrelin acetate), SYNAREL™ (nafarelin acetate), and ZOLADEX™ (goserelin acetate); synthetic preparations of thyrotropin-releasing hormone such as RELEFACT TRH™ and THYPINONE™ (protirelin); recombinant human TSH such as THYROGEN™; synthetic preparations of the sodium salts of the natural isomers of thyroid hormones such as L-T₄™, SYNTHROID™and LEVOTHROID™ (levothyroxine sodium), L-T₃™, CYTOMEL™ and TRIOSTAT™ (liothyroine sodium), and THYROLAR™ (liotrix); antithyroid compounds such as 6-n-propylthiouracil (propylthiouracil), 1-methyl-2-mercaptoimidazole and TAPAZOLE™ (methimazole), NEO-MERCAZOLE™ (carbimazole); beta-adrenergic receptor antagonists such as propranolol and esmolol; Ca²⁺ channel blockers; dexamethasone and iodinated radiological contrast agents such as TELEPAQUE™ (iopanoic acid) and ORAGRAFIN™ (sodium ipodate).

[1018] Additional treatments for endocrine and/or hormone imbalance disorders include, but are not limited to, estrogens or congugated estrogens such as ESTRACE™ (estradiol), ESTINYL™ (ethinyl estradiol), PREMARIN™, ESTRATAB™, ORTHO-EST™, OGEN™ and estropipate (estrone), ESTROVIS™ (quinestrol), ESTPADERM™ (estradiol), DELESTROGEN™ and VALERGEN™ (estradiol valerate), DEPO-ESTRADIOL CYPIONATE™ and ESTROJECT LA™ (estradiol cypionate); antiestrogens such as NOLVADEX™ (tamoxifen), SEROPHENE™ and CLOMID™ (clomiphene); progestins such as DURALUTIN™ (hydroxyprogesterone caproate), MPA™ and DEPO-PROVERA™ (medroxyprogesterone acetate), PROVERA™ and CYCRIN™ (MPA), MEGACE™ (megestrol acetate), NORLUTIN™ (norethindrone), and NORLUTATE™ and AYGESTIN™ (norethindrone acetate); progesterone implants such as NORPLANT SYSTEM™ (subdermal implants of norgestrel); antiprogestins such as RU 486™ (mifepristone); hormonal contraceptives such as ENOVID™, (norethynodrel plus mestranol), PROGESTASERT™ (intrauterine device that releases progesterone), LOESTRIN™, BREVICON™, MODICON™, GENORA™, NELONA™, NORINYL™, OVACON-35™ and OVACON-50™ (ethinyl estradiol/norethindrone), LEVLEN™, NORDETTE™, TRI-LEVLEN™ and TRIPHASIL-21™ (ethinyl estradiol/levonorgestrel) LO/OVRAL™ and OVRAL™ (ethinyl estradiol/norgestrel), DEMULEN™ (ethinyl estradiol/ethynodiol diacetate), NORINYL™, ORTHO-NOVUMO, NORETHIN™, GENORA™, and NELOVA™ (norethindrone/mestranol), DESOGEN™ and ORTHO-CEPT™ (ethinyl estradiol/desogestrel), ORTHO-CYCLEN™ and ORTHO-TRICYCLEN™ (ethinyl estradiol/norgestimate), MICRONOR™ and NOR-QD™ (norethindrone), and OVRETTE™ (norgestrel).

[1019] Additional treatments for endocrine and/or hormone imbalance disorders include, but are not limited to, testosterone esters such as methenolone acetate and testosterone undecanoate; parenteral and oral androgens such as TESTOJECT-50™ (testosterone), TESTEX™ (testosterone propionate), DELATESTRYL™ (testosterone enanthate), DEPO-TESTOSTERONE™ (testosterone cypionate), DANOCRINE™ (danazol), HALOTESTIN™ (fluoxymesterone), ORETON METHYL™, TESTRED™ and VIRILON™ (methyltestosterone), and OXANDRIN™ (oxandrolone); testosterone transdermal systems such as TESTODERM™; androgen receptor antagonist and 5-alpha-reductase inhibitors such as ANDROCUR™ (cyproterone acetate), EULEXIN™ (flutamide), and PROSCAR™ (finasteride); adrenocorticotropic hormone preparations such as CORTROSYN™ (cosyntropin); adrenocortical steroids and their synthetic analogs such as ACLOVATE™ (alclometasone dipropionate), CYCLOCORT™ (amcinonide), BECLOVENT™ and VANCERIL™ (beclomethasone dipropionate), CELESTONE™ (betamethasone), BENISONE™ and UTICORT™ (betamethasone benzoate), DIPROSONE™ (betamethasone dipropionate), CELESTONE PHOSPHATE™ (betamethasone sodium phosphate), CELESTONE SOLUSPAN™ (betamethasone sodium phosphate and acetate), BETA-VAL™ and VALISONE™ (betamethasone valerate), TEMOVATE™ (clobetasol propionate), CLODERM™ (clocortolone pivalate), CORTEF™ and HYDROCORTONE™ (cortisol (hydrocortisone)), HYDROCORTONE ACETATE™ (cortisol (hydrocortisone) acetate), LOCOID™ (cortisol (hydrocortisone) butyrate), HYDROCORTONE PHOSPHATE™ (cortisol (hydrocortisone) sodium phosphate), A-HYDROCORT™ and SOLU CORTEF™ (cortisol (hydrocortisone) sodium succinate), WESTCORT™ (cortisol (hydrocortisone) valerate), CORTISONE ACETATE™ (cortisone acetate), DESOWEN™ and TRIDESILON™ (desonide), TOPICORT™ (desoximetasone), DECADRON™ (dexamethasone), DECADRON LA™ (dexamethasone acetate), DECADRON PHOSPHATE™ and HEXADROL PHOSPHATE™ (dexamethasone sodium phosphate), FLORONE™ and MAXIFLOR™ (diflorasone diacetate), FLORINEF ACETATE™ (fludrocortisone acetate), AEROBID™ and NASALIDE™ (flunisolide), FLUONID™ and SYNALAR™ (fluocinolone acetonide), LIDEX™ (fluocinonide), FLUOR—OP™ and FML™ (fluorometholone), CORDRAN™ (flurandrenolide), HALOG™ (halcinonide), HMS LIZUIFILM™ (medrysone), MEDROL™ (methylprednisolone), DEPO-MEDROL™ and MEDROL ACETATE™ (methylprednisone acetate), A-METHAPRED™ and SOLUMEDROL™ (methylprednisolone sodium succinate), ELOCON™ (mometasone furoate), HALDRONE™ (paramethasone acetate), DELTA-CORTEF™ (prednisolone), ECONOPRED™ (prednisolone acetate), HYDELTRASOL™ (prednisolone sodium phosphate), HYDELTRA-T.B.A™ (prednisolone tebutate), DELTASONE™ (prednisone), ARISTOCORT™ and KENACORT™ (triamcinolone), KENALOG™ (triamcinolone acetonide), ARISTOCORT™ and KENACORT DIACETATE™ (triamcinolone diacetate), and ARISTOSPAN™ (triamcinolone hexacetonide); inhibitors of biosynthesis and action of adrenocortical steroids such as CYTADREN™ (aminoglutethimide), NIZORAL™ (ketoconazole), MODRASTANE™ (trilostane), and METOPIRONE™ (metyrapone); bovine, porcine or human insulin or mixtures thereof; insulin analogs; recombinant human insulin such as HUMULIN™ and NOVOLIN™; oral hypoglycemic agents such as ORAMIDE™ and ORINASE™ (tolbutamide), DIABINESE™ (chlorpropamide), TOLAMIDE™ and TOLINASE™ (tolazamide), DYMELOR™ (acetohexamide), glibenclamide, MICRONASE™, DIBETA™ and GLYNASE™ (glyburide), GLUCOTROL™ (glipizide), and DIAMICRON™ (gliclazide), GLUCOPHAGE™ (metformin), ciglitazone, pioglitazone, and alpha-glucosidase inhibitors; bovine or porcine glucagon; somatostatins such as SANDOSTATIN™ (octreotide); and diazoxides such as PROGLYCEM™ (diazoxide).

[1020] In one embodiment, the Therapeutics of the invention are administered in combination with treatments for uterine motility disorders. Treatments for uterine motility disorders include, but are not limited to, estrogen drugs such as conjugated estrogens (e.g., PREMARIN® and ESTRATAB®), estradiols (e.g., CLIMARA® and ALORA®), estropipate, and chlorotrianisene; progestin drugs (e.g., AMEN® (medroxyprogesterone), MICRONOR® (norethidrone acetate), PROMETRIUM® progesterone, and megestrol acetate); and estrogen/progesterone combination therapies such as, for example, conjugated estrogens/medroxyprogesterone (e.g., PREMPRO™ and PREMPHASE®) and norethindrone acetate/ethinyl estsradiol (e.g., FEMHRT™).

[1021] In an additional embodiment, the Therapeutics of the invention are administered in combination with drugs effective in treating iron deficiency and hypochromic anemias, including but not limited to, ferrous sulfate (iron sulfate, FEOSOL™), ferrous fumarate (e.g., FEOSTA™), ferrous gluconate (e.g., FERGON™), polysaccharide-iron complex (e.g., NIFEREX™), iron dextran injection (e.g., INFED™), cupric sulfate, pyroxidine, riboflavin, Vitamin B₁₂, cyancobalamin injection (e.g., REDISOL™, RUBRAMIN PC™), hydroxocobalamin, folic acid (e.g., FOLVITE™), leucovorin (folinic acid, 5-CHOH4PteGlu, citrovorum factor) or WELLCOVORIN (Calcium salt of leucovorin), transferrin or ferritin.

[1022] In certain embodiments, the Therapeutics of the invention are administered in combination with agents used to treat psychiatric disorders. Psychiatric drugs that may be administered with the Therapeutics of the invention include, but are not limited to, antipsychotic agents (e.g., chlorpromazine, chlorprothixene, clozapine, fluphenazine, haloperidol, loxapine, mesoridazine, molindone, olanzapine, perphenazine, pimozide, quetiapine, risperidone, thioridazine, thiothixene, trifluoperazine, and triflupromazine), antimanic agents (e.g., carbamazepine, divalproex sodium, lithium carbonate, and lithium citrate), antidepressants (e.g., amitriptyline, amoxapine, bupropion, citalopram, clomipramine, desipramine, doxepin, fluvoxamine, fluoxetine, imipramine, isocarboxazid, maprotiline, mirtazapine, nefazodone, nortriptyline, paroxetine, phenelzine, protriptyline, sertraline, tranylcypromine, trazodone, trimipramine, and venlafaxine), antianxiety agents (e.g., alprazolam, buspirone, chlordiazepoxide, clorazepate, diazepam, halazepam, lorazepam, oxazepam, and prazepam), and stimulants (e.g., d-amphetamine, methylphenidate, and pemoline).

[1023] In other embodiments, the Therapeutics of the invention are administered in combination with agents used to treat neurological disorders. Neurological agents that may be administered with the Therapeutics of the invention include, but are not limited to, antiepileptic agents (e.g., carbamazepine, clonazepam, ethosuximide, phenobarbital, phenytoin, primidone, valproic acid, divalproex sodium, felbamate, gabapentin, lamotrigine, levetiracetam, oxcarbazepine, tiagabine, topiramate, zonisamide, diazepam, lorazepam, and clonazepam), antiparkinsonian agents (e.g., levodopa/carbidopa, selegiline, amantidine, bromocriptine, pergolide, ropinirole, pramipexole, benztropine; biperiden; ethopropazine; procyclidine; trihexyphenidyl, tolcapone), and ALS therapeutics (e.g. riluzole).

[1024] In another embodiment, Therapeutics of the invention are administered in combination with vasodilating agents and/or calcium channel blocking agents. Vasodilating agents that may be administered with the Therapeutics of the invention include, but are not limited to, Angiotensin Converting Enzyme (ACE) inhibitors (e.g., papaverine, isoxsuprine, benazepril, captopril, cilazapril, enalapril, enalaprilat, fosinopril, lisinopril, moexipril, perindopril, quinapril, ramipril, spirapril, trandolapril, and nylidrin), and nitrates (e.g., isosorbide dinitrate, isosorbide mononitrate, and nitroglycerin). Examples of calcium channel blocking agents that may be administered in combination with the Therapeutics of the invention include, but are not limited to amlodipine, bepridil, diltiazem, felodipine, flunarizine, isradipine, nicardipine, nifedipine, nimodipine, and verapamil.

[1025] In certain embodiments, the Therapeutics of the invention are administered in combination with treatments for gastrointestinal disorders. Treatments for gastrointestinal disorders that may be administered with the Therapeutic of the invention include, but are not limited to, H₂ histamine receptor antagonists (e.g., TAGAMET™ (cimetidine), ZANTAC™ (ranitidine), PEPCID™ (famotidine), and AXID™ (nizatidine)); inhibitors of H⁺, K⁺ ATPase (e.g., PREVACID™ (lansoprazole) and PRILOSEC™ (omeprazole)); Bismuth compounds (e.g., PEPTO-BISMOL™ (bismuth subsalicylate) and DE-NOL™ (bismuth subcitrate)); various antacids; sucralfate; prostaglandin analogs (e.g. CYTOTEC™ (misoprostol)); muscarinic cholinergic antagonists; laxatives (e.g., surfactant laxatives, stimulant laxatives, saline and osmotic laxatives); antidiarrheal agents (e.g., LOMOTIL™ (diphenoxylate), MOTOFEN™ (diphenoxin), and IMODIUM™ (loperamide hydrochloride)), synthetic analogs of somatostatin such as SANDOSTATIN™ (octreotide), antiemetic agents (e.g., ZOFRAN™ (ondansetron), KYTRIL™ (granisetron hydrochloride), tropisetron, dolasetron, metoclopramide, chlorpromazine, perphenazine, prochlorperazine, promethazine, thiethylperazine, triflupromazine, domperidone, haloperidol, droperidol, trimethobenzamide, dexamethasone, methylprednisolone, dronabinol, and nabilone); D2 antagonists (e.g., metoclopramide, trimethobenzamide and chlorpromazine); bile salts; chenodeoxycholic acid; ursodeoxycholic acid; and pancreatic enzyme preparations such as pancreatin and pancrelipase.

[1026] In additional embodiments, the Therapeutics of the invention are administered in combination with other therapeutic or prophylactic regimens, such as, for example, radiation therapy.

### Example 14

### Method of Treating Decreased Levels of the Polypeptide

[1027] The present invention relates to a method for treating an individual in need of an increased level of a polypeptide of the invention in the body comprising administering to such an individual a composition comprising a therapeutically effective amount of an agonist of the invention (including polypeptides of the invention). Moreover, it will be appreciated that conditions caused by a decrease in the standard or normal expression level of a polypeptide of the present invention in an individual can be treated by administering the agonist or antagonist of the present invention. Thus, the invention also provides a method of treatment of an individual in need of an increased level of the polypeptide comprising administering to such an individual a Therapeutic comprising an amount of the agonist or antagonist to increase the activity level of the polypeptide in such an individual.

[1028] For example, a patient with decreased levels of a polypeptide receives a daily dose 0.1-100 ug/kg of the agonist or antagonist for six consecutive days. The exact details of the dosing scheme, based on administration and formulation, are provided in Example 13.

### Example 15

### Method of Treating Increased Levels of the Polypeptide

[1029] The present invention also relates to a method of treating an individual in need of a decreased level of a polypeptide of the invention in the body comprising administering to such an individual a composition comprising a therapeutically effective amount of an antagonist of the invention (including polypeptides and antibodies of the invention).

[1030] In one example, antisense technology is used to inhibit production of a polypeptide of the present invention. This technology is one example of a method of decreasing levels of a polypeptide, due to a variety of etiologies, such as cancer.

[1031] For example, a patient diagnosed with abnormally increased levels of a polypeptide is administered intravenously antisense polynucleotides at 0.5, 1.0, 1.5, 2.0 and 3.0 mg/kg day for 21 days. This treatment is repeated after a 7-day rest period if the treatment was well tolerated. The antisense polynucleotides of the present invention can be formulated using techniques and formulations described herein (e.g. see Example 13), or otherwise known in the art.

### Example 16

### Method of Treatment Using Gene Therapy—ex vivo

[1032] One method of gene therapy transplants fibroblasts, which are capable of expressing a polypeptide, onto a patient. Generally, fibroblasts are obtained from a subject by skin biopsy. The resulting tissue is placed in tissue-culture medium and separated into small pieces. Small chunks of the tissue are placed on a wet surface of a tissue culture flask, approximately ten pieces are placed in each flask. The flask is turned upside down, closed tight and left at room temperature over night. After 24 hours at room temperature, the flask is inverted and the chunks of tissue remain fixed to the bottom of the flask and fresh media (e.g., Ham's F12 media, with 10% FBS, penicillin and streptomycin) is added. The flasks are then incubated at 37 degree C. for approximately one week.

[1033] At this time, fresh media is added and subsequently changed every several days. After an additional two weeks in culture, a monolayer of fibroblasts emerge. The monolayer is trypsinized and scaled into larger flasks.

[1034] pMV-7 (Kirschmeier, P. T. et al., DNA, 7:219-25 (1988)), flanked by the long terminal repeats of the Moloney murine sarcoma virus, is digested with EcoRI and HindIII and subsequently treated with calf intestinal phosphatase. The linear vector is fractionated on agarose gel and purified, using glass beads.

[1035] The cDNA encoding a polypeptide of the present invention can be amplified using PCR primers which correspond to the 5′ and 3′ end sequences respectively as set forth in Example 1 using primers and having appropriate restriction sites and initiation/stop codons, if necessary. Preferably, the 5′ primer contains an EcoRI site and the 3′ primer includes a HindIII site. Equal quantities of the Moloney murine sarcoma virus linear backbone and the amplified EcoRI and HindIII fragment are added together, in the presence of T4 DNA ligase. The resulting mixture is maintained under conditions appropriate for ligation of the two fragments. The ligation mixture is then used to transform bacteria HB101, which are then plated onto agar containing kanamycin for the purpose of confirming that the vector has the gene of interest properly inserted.

[1036] The amphotropic pA317 or GP+am12 packaging cells are grown in tissue culture to confluent density in Dulbecco's Modified Eagles Medium (DMEM) with 10% calf serum (CS), penicillin and streptomycin. The MSV vector containing the gene is then added to the media and the packaging cells transduced with the vector. The packaging cells now produce infectious viral particles containing the gene (the packaging cells are now referred to as producer cells).

[1037] Fresh media is added to the transduced producer cells, and subsequently, the media is harvested from a 10 cm plate of confluent producer cells. The spent media, containing the infectious viral particles, is filtered through a millipore filter to remove detached producer cells and this, media is then used to infect fibroblast cells. Media is removed from a sub-confluent plate of fibroblasts and quickly replaced with the media from the producer cells. This media is removed and replaced with fresh media. If the titer of virus is high, then virtually all fibroblasts will be infected and no selection is required. If the titer is very low, then it is necessary to use a retroviral vector that has a selectable marker, such as neo or his. Once the fibroblasts have been efficiently infected, the fibroblasts are analyzed to determine whether protein is produced.

[1038] The engineered fibroblasts are then transplanted onto the host, either alone or after having been grown to confluence on cytodex 3 microcarrier beads.

### Example 17

### Gene Therapy Using Endogenous Genes Corresponding to Polynucleotides of the Invention

[1039] Another method of gene therapy according to the present invention involves operably associating the endogenous polynucleotide sequence of the invention with a promoter via homologous recombination as described, for example, in U.S. Pat. No. 5,641,670, issued Jun. 24, 1997; International Publication NO: WO 96/29411, published Sep. 26, 1996; International Publication NO: WO 94/12650, published Aug. 4, 1994; Koller et al., Proc. Natl. Acad. Sci. USA, 86:8932-8935 (1989); and Zijlstra et al., Nature, 342:435-438 (1989). This method involves the activation of a gene which is present in the target cells, but which is not expressed in the cells, or is expressed at a lower level than desired.

[1040] Polynucleotide constructs are made which contain a promoter and targeting sequences, which are homologous to the 5′ non-coding sequence of endogenous polynucleotide sequence, flanking the promoter. The targeting sequence will be sufficiently near the 5′ end of the polynucleotide sequence so the promoter will be operably linked to the endogenous sequence upon homologous recombination. The promoter and the targeting sequences can be amplified using PCR. Preferably, the amplified promoter contains distinct restriction enzyme sites on the 5′ and 3′ ends. Preferably, the 3′ end of the first targeting sequence contains the same restriction enzyme site as the 5′ end of the amplified promoter and the 5′ end of the second targeting sequence contains the same restriction site as the 3′ end of the amplified promoter.

[1041] The amplified promoter and the amplified targeting sequences are digested with the appropriate restriction enzymes and subsequently treated with calf intestinal phosphatase. The digested promoter and digested targeting sequences are added together in the presence of T4 DNA ligase. The resulting mixture is maintained under conditions appropriate for ligation of the two fragments. The construct is size fractionated on an agarose gel, then purified by phenol extraction and ethanol precipitation.

[1042] In this Example, the polynucleotide constructs are administered as naked polynucleotides via electroporation. However, the polynucleotide constructs may also be administered with transfection-facilitating agents, such as liposomes, viral sequences, viral particles, precipitating agents, etc. Such methods of delivery are known in the art.

[1043] Once the cells are transfected, homologous recombination will take place which results in the promoter being operably linked to the endogenous polynucleotide sequence. This results in the expression of polynucleotide corresponding to the polynucleotide in the cell. Expression may be detected by immunological staining, or any other method known in the art.

[1044] Fibroblasts are obtained from a subject by skin biopsy. The resulting tissue is placed in DMEM+10% fetal calf serum. Exponentially growing or early stationary phase fibroblasts are trypsinized and rinsed from the plastic surface with nutrient medium. An aliquot of the cell suspension is removed for counting, and the remaining cells are subjected to centrifugation. The supernatant is aspirated and the pellet is resuspended in 5 ml of electroporation buffer (20 mM HEPES pH 7.3, 137 mM NaCl, 5 mM KCl, 0.7 mM Na₂ HPO₄, 6 mM dextrose). The cells are recentrifuged, the supernatant aspirated, and the cells resuspended in electroporation buffer containing 1 mg/ml acetylated bovine serum albumin. The final cell suspension contains approximately 3×10⁶ cells/ml. Electroporation should be performed immediately following resuspension.

[1045] Plasmid DNA is prepared according to standard techniques. For example, to construct a plasmid for targeting to the locus corresponding to the polynucleotide of the invention, plasmid pUC 18 (MBI Fermentas, Amherst, N.Y.) is digested with HindIII. The CMV promoter is amplified by PCR with an XbaI site on the 5′ end and a BamHI site on the 3′ end. Two non-coding sequences are amplified via PCR: one non-coding sequence (fragment 1) is amplified with a HindIII site at the 5′ end and an Xba site at the 3′end; the other non-coding sequence (fragment 2) is amplified with a BamHI site at the 5′end and a HindIII site at the 3′end. The CMV promoter and the fragments (1 and 2) are digested with the appropriate enzymes (CMV promoter—XbaI and BamHI; fragment 1—XbaI; fragment 2—BamHI) and ligated together. The resulting ligation product is digested with HindIII, and ligated with the HindIII-digested pUC 18 plasmid.

[1046] Plasmid DNA is added to a sterile cuvette with a 0.4 cm electrode gap (Bio-Rad). The final DNA concentration is generally at least 120 μg/ml. 0.5 ml of the cell suspension (containing approximately 1.5.×10⁶ cells) is then added to the cuvette, and the cell suspension and DNA solutions are gently mixed. Electroporation is performed with a Gene-Pulser apparatus (Bio-Rad). Capacitance and voltage are set at 960 μF and 250-300 V, respectively. As voltage increases, cell survival decreases, but the percentage of surviving cells that stably incorporate the introduced DNA into their genome increases dramatically. Given these parameters, a pulse time of approximately 14-20 mSec should be observed.

[1047] Electroporated cells are maintained at room temperature for approximately 5 min, and the contents of the cuvette are then gently removed with a sterile transfer pipette. The cells are added directly to 10 ml of prewarmed nutrient media (DMEM with 15% calf serum) in a 10 cm dish and incubated at 37 degree C. The following day, the media is aspirated and replaced with 10 ml of fresh media and incubated for a further 16-24 hours.

[1048] The engineered fibroblasts are then injected into the host, either alone or after having been grown to confluence on cytodex 3 microcarrier beads. The fibroblasts now produce the protein product. The fibroblasts can then be introduced into a patient as described above.

### Example 18

### Method of Treatment Using Gene Therapy—in vivo

[1049] Another aspect of the present invention is using in vivo gene therapy methods to treat disorders, diseases and conditions. The gene therapy method relates to the introduction of naked nucleic acid (DNA, RNA, and antisense DNA or RNA) sequences into an animal to increase or decrease the expression of the polypeptide. The polynucleotide of the present invention may be operatively linked to (i.e., associated with) a promoter or any other genetic elements necessary for the expression of the polypeptide by the target tissue. Such gene therapy and delivery techniques and methods are known in the art, see, for example, WO90/11092, WO98/11779; U.S. Pat. No. 5,693,622, 5705151, 5580859; Tabata et al., Cardiovasc. Res. 35(3):470-479 (1997); Chao et al., Pharmacol. Res. 35(6):517-522 (1997); Wolff, Neuromuscul. Disord. 7(5):314-318 (1997); Schwartz et al., Gene Ther. 3(5):405-411 (1996); Tsurumi et al., Circulation 94(12):3281-3290 (1996) (incorporated herein by reference).

[1050] The polynucleotide constructs may be delivered by any method that delivers injectable materials to the cells of an animal, such as, injection into the interstitial space of tissues (heart, muscle, skin, lung, liver, intestine and the like). The polynucleotide constructs can be delivered in a pharmaceutically acceptable liquid or aqueous carrier.

[1051] The term “naked” polynucleotide, DNA or RNA, refers to sequences that are free from any delivery vehicle that acts to assist, promote, or facilitate entry into the cell, including viral sequences, viral particles, liposome formulations, lipofectin or precipitating agents and the like. However, the polynucleotides of the present invention may also be delivered in liposome formulations (such as those taught in Felgner P. L. et al. (1995) Ann. NY Acad. Sci. 772:126-139 and Abdallah B. et al. (1995) Biol. Cell 85(1):1-7) which can be prepared by methods well known to those skilled in the art.

[1052] The polynucleotide vector constructs used in the gene therapy method are preferably constructs that will not integrate into the host genome nor will they contain sequences that allow for replication. Any strong promoter known to those skilled in the art can be used for driving the expression of DNA. Unlike other gene therapy techniques, one major advantage of introducing naked nucleic acid sequences into target cells is the transitory nature of the polynucleotide synthesis in the cells. Studies have shown that non-replicating DNA sequences can be introduced into cells to provide production of the desired polypeptide for periods of up to six months.

[1053] The polynucleotide construct can be delivered to the interstitial space of tissues within an animal, including muscle, skin, brain, lung, liver, spleen, bone marrow, thymus, heart, lymph, blood, bone, cartilage, pancreas, kidney, gall bladder, stomach, intestine, testis, ovary, uterus, rectum, nervous system, eye, gland, and connective tissue. Interstitial space of the tissues comprises the intercellular fluid, mucopolysaccharide matrix among the reticular fibers of organ tissues, elastic fibers in the walls of vessels or chambers, collagen fibers of fibrous tissues, or that same matrix within connective tissue ensheathing muscle cells or in the lacunae of bone. It is similarly the space occupied by the plasma of the circulation and the lymph fluid of the lymphatic channels. Delivery to the interstitial space of muscle tissue is preferred for the reasons discussed below. They may be conveniently delivered by injection into the tissues comprising these cells. They are preferably delivered to and expressed in persistent, non-dividing cells which are differentiated, although delivery and expression may be achieved in non-differentiated or less completely differentiated cells, such as, for example, stem cells of blood or skin fibroblasts. In vivo muscle cells are particularly competent in their ability to take up and express polynucleotides.

[1054] For the naked polynucleotide injection, an effective dosage amount of DNA or RNA will be in the range of from about 0.05 g/kg body weight to about 50 mg/kg body weight. Preferably the dosage will be from about 0.005 mg/kg to about 20 mg/kg and more preferably from about 0.05 mg/kg to about 5 mg/kg. Of course, as the artisan of ordinary skill will appreciate, this dosage will vary according to the tissue site of injection. The appropriate and effective dosage of nucleic acid sequence can readily be determined by those of ordinary skill in the art and may depend on the condition being treated and the route of administration. The preferred route of administration is by the parenteral route of injection into the interstitial space of tissues. However, other parenteral routes may also be used, such as, inhalation of an aerosol formulation particularly for delivery to lungs or bronchial tissues, throat or mucous membranes of the nose. In addition, naked polynucleotide constructs can be delivered to arteries during angioplasty by the catheter used in the procedure.

[1055] The dose response effects of injected polynucleotide in muscle in vivo is determined as follows. Suitable template DNA for production of mRNA coding for polypeptide of the present invention is prepared in accordance with a standard recombinant DNA methodology. The template DNA, which may be either circular or linear, is either used as naked DNA or complexed with liposomes. The quadriceps muscles of mice are then injected with various amounts of the template DNA.

[1056] Five to six week old female and male Balb/C mice are anesthetized by intraperitoneal injection with 0.3 ml of 2.5% Avertin. A 1.5 cm incision is made on the anterior thigh, and the quadriceps muscle is directly visualized. The template DNA is injected in 0.1 ml of carrier in a 1 cc syringe through a 27 gauge needle over one minute, approximately 0.5 cm from the distal insertion site of the muscle into the knee and about 0.2 cm deep. A suture is placed over the injection site for future localization, and the skin is closed with stainless steel clips.

[1057] After an appropriate incubation time (e.g., 7 days) muscle extracts are prepared by excising the entire quadriceps. Every fifth 15 um cross-section of the individual quadriceps muscles is histochemically stained for protein expression. A time course for protein expression may be done in a similar fashion except that quadriceps from different mice are harvested at different times. Persistence of DNA in muscle following injection may be determined by Southern blot analysis after preparing total cellular DNA and HIRT supernatants from injected and control mice. The results of the above experimentation in mice can be used to extrapolate proper dosages and other treatment parameters in humans and other animals using naked DNA.

### Example 19

### Transgenic Animals

[1058] The polypeptides of the invention can also be expressed in transgenic animals. Animals of any species, including, but not limited to, mice, rats, rabbits, hamsters, guinea pigs, pigs, micro-pigs, goats, sheep, cows and non-human primates, e.g., baboons, monkeys, and chimpanzees may be used to generate transgenic animals. In a specific embodiment, techniques described herein or otherwise known in the art, are used to express polypeptides of the invention in humans, as part of a gene therapy protocol.

[1059] Any technique known in the art may be used to introduce the transgene (i.e., polynucleotides of the invention) into animals to produce the founder lines of transgenic animals. Such techniques include, but are not limited to, pronuclear microinjection (Paterson et al., Appl. Microbiol. Biotechnol. 40:691-698 (1994); Carver et al., Biotechnology (NY) 11:1263-1270 (1993); Wright et al., Biotechnology (NY) 9:830-834 (1991); and Hoppe et al., U.S. Pat. No. 4,873,191 (1989)); retrovirus mediated gene transfer into germ lines (Van der Putten et al., Proc. Natl. Acad. Sci., USA 82:6148-6152 (1985)), blastocysts or embryos; gene targeting in embryonic stem cells (Thompson et al., Cell 56:313-321 (1989)); electroporation of cells or embryos (Lo, 1983, Mol Cell. Biol. 3:1803-1814 (1983)); introduction of the polynucleotides of the invention using a gene gun (see, e.g., Ulmer et al., Science 259:1745 (1993); introducing nucleic acid constructs into embryonic pleuripotent stem cells and transferring the stem cells back into the blastocyst; and sperm-mediated gene transfer (Lavitrano et al., Cell 57:717-723 (1989); etc. For a review of such techniques, see Gordon, “Transgenic Animals,” Intl. Rev. Cytol. 115:171-229 (1989), which is incorporated by reference herein in its entirety.

[1060] Any technique known in the art may be used to produce transgenic clones containing polynucleotides of the invention, for example, nuclear transfer into enucleated oocytes of nuclei from cultured embryonic, fetal, or adult cells induced to quiescence (Campell et al., Nature 380:64-66 (1996); Wilmut et al., Nature 385:810-813 (1997)).

[1061] The present invention provides for transgenic animals that carry the transgene in all their cells, as well as animals which carry the transgene in some, but not all their cells, i.e., mosaic animals or chimeric. The transgene may be integrated as a single transgene or as multiple copies such as in concatamers, e.g., head-to-head tandems or head-to-tail tandems. The transgene may also be selectively introduced into and activated in a particular cell type by following, for example, the teaching of Lasko et al. (Lasko et al., Proc. Natl. Acad. Sci. USA 89:6232-6236 (1992)). The regulatory sequences required for such a cell-type specific activation will depend upon the particular cell type of interest, and will be apparent to those of skill in the art. When it is desired that the polynucleotide transgene be integrated into the chromosomal site of the endogenous gene, gene targeting is preferred. Briefly, when such a technique is to be utilized, vectors containing some nucleotide sequences homologous to the endogenous gene are designed for the purpose of integrating, via homologous recombination with chromosomal sequences, into and disrupting the function of the nucleotide sequence of the endogenous gene. The transgene may also be selectively introduced into a particular cell type, thus inactivating the endogenous gene in only that cell type, by following, for example, the teaching of Gu et al. (Gu et al., Science 265:103-106 (1994)). The regulatory sequences required for such a cell-type specific inactivation will depend upon the particular cell type of interest, and will be apparent to those of skill in the art.

[1062] Once transgenic animals have been generated, the expression of the recombinant gene may be assayed utilizing standard techniques. Initial screening may be accomplished by Southern blot analysis or PCR techniques to analyze animal tissues to verify that integration of the transgene has taken place. The level of mRNA expression of the transgene in the tissues of the transgenic animals may also be assessed using techniques which include, but are not limited to, Northern blot analysis of tissue samples obtained from the animal, in situ hybridization analysis, and reverse transcriptase-PCR (rt-PCR). Samples of transgenic gene-expressing tissue may also be evaluated immunocytochemically or immunohistochemically using antibodies specific for the transgene product.

[1063] Once the founder animals are produced, they may be bred, inbred, outbred, or crossbred to produce colonies of the particular animal. Examples of such breeding strategies include, but are not limited to: outbreeding of founder animals with more than one integration site in order to establish separate lines; inbreeding of separate lines in order to produce compound transgenics that express the transgene at higher levels because of the effects of additive expression of each transgene; crossing of heterozygous transgenic animals to produce animals homozygous for a given integration site in order to both augment expression and eliminate the need for screening of animals by DNA analysis; crossing of separate homozygous lines to produce compound heterozygous or homozygous lines; and breeding to place the transgene on a distinct background that is appropriate for an experimental model of interest.

[1064] Transgenic animals of the invention have uses which include, but are not limited to, animal model systems useful in elaborating the biological function of polypeptides of the present invention, studying conditions and/or disorders associated with aberrant expression, and in screening for compounds effective in ameliorating such conditions and/or disorders.

### Example 20

### Knock-Out Animals

[1065] Endogenous gene expression can also be reduced by inactivating or “knocking out” the gene and/or its promoter using targeted homologous recombination. (e.g., see Smithies et al., Nature 317:230-234 (1985); Thomas & Capecchi, Cell 51:503-512 (1987); Thompson et al., Cell 5:313-321 (1989); each of which is incorporated by reference herein in its entirety). For example, a mutant, non-functional polynucleotide of the invention (or a completely unrelated DNA sequence) flanked by DNA homologous to the endogenous polynucleotide sequence (either the coding regions or regulatory regions of the gene) can be used, with or without a selectable marker and/or a negative selectable marker, to transfect cells that express polypeptides of the invention in vivo. In another embodiment, techniques known in the art are used to generate knockouts in cells that contain, but do not express the gene of interest. Insertion of the DNA construct, via targeted homologous recombination, results in inactivation of the targeted gene. Such approaches are particularly suited in research and agricultural fields where modifications to embryonic stem cells can be used to generate animal offspring with an inactive targeted gene (e.g., see Thomas & Capecchi 1987 and Thompson 1989, supra). However this approach can be routinely adapted for use in humans provided the recombinant DNA constructs are directly administered or targeted to the required site in vivo using appropriate viral vectors that will be apparent to those of skill in the art.

[1066] In further embodiments of the invention, cells that are genetically engineered to express the polypeptides of the invention, or alternatively, that are genetically engineered not to express the polypeptides of the invention (e.g., knockouts) are administered to a patient in vivo. Such cells may be obtained from the patient (i.e., animal, including human) or an MHC compatible donor and can include, but are not limited to fibroblasts, bone marrow cells, blood cells (e.g., lymphocytes), adipocytes, muscle cells, endothelial cells etc. The cells are genetically engineered in vitro using recombinant DNA techniques to introduce the coding sequence of polypeptides of the invention into the cells, or alternatively, to disrupt the coding sequence and/or endogenous regulatory sequence associated with the polypeptides of the invention, e.g., by transduction (using viral vectors, and preferably vectors that integrate the transgene into the cell genome) or transfection procedures, including, but not limited to, the use of plasmids, cosmids, YACs, naked DNA, electroporation, liposomes, etc. The coding sequence of the polypeptides of the invention can be placed under the control of a strong constitutive or inducible promoter or promoter/enhancer to achieve expression, and preferably secretion, of the polypeptides of the invention. The engineered cells which express and preferably secrete the polypeptides of the invention can be introduced into the patient systemically, e.g., in the circulation, or intraperitoneally.

[1067] Alternatively, the cells can be incorporated into a matrix and implanted in the body, e.g., genetically engineered fibroblasts can be implanted as part of a skin graft; genetically engineered endothelial cells can be implanted as part of a lymphatic or vascular graft. (See, for example, Anderson et al. U.S. Pat. No. 5,399,349; and Mulligan & Wilson, U.S. Pat. No. 5,460,959 each of which is incorporated by reference herein in its entirety).

[1068] When the cells to be administered are non-autologous or non-MHC compatible cells, they can be administered using well known techniques which prevent the development of a host immune response against the introduced cells. For example, the cells may be introduced in an encapsulated form which, while allowing for an exchange of components with the immediate extracellular environment, does not allow the introduced cells to be recognized by the host immune system.

[1069] Transgenic and “knock-out” animals of the invention have uses which include, but are not limited to, animal model systems useful in elaborating the biological function of polypeptides of the present invention, studying conditions and/or disorders associated with aberrant expression, and in screening for compounds effective in ameliorating such conditions and/or disorders.

### Example 21

### Assays Detecting Stimulation or Inhibition of B Cell Proliferation and Differentiation

[1070] Generation of functional humoral immune responses requires both soluble and cognate signaling between B-lineage cells and their microenvironment. Signals may impart a positive stimulus that allows a B-lineage cell to continue its programmed development, or a negative stimulus that instructs the cell to arrest its current developmental pathway. To date, numerous stimulatory and inhibitory signals have been found to influence B cell responsiveness including IL-2, IL-4, IL-5, IL-6, IL-7, IL10, IL-13, IL-14 and IL-15. Interestingly, these signals are by themselves weak effectors but can, in combination with various co-stimulatory proteins, induce activation, proliferation, differentiation, homing, tolerance and death among B cell populations.

[1071] One of the best studied classes of B-cell co-stimulatory proteins is the TNF-superfamily. Within this family CD40, CD27, and CD30 along with their respective ligands CD154, CD70, and CD153 have been found to regulate a variety of immune responses. Assays which allow for the detection and/or observation of the proliferation and differentiation of these B-cell populations and their precursors are valuable tools in determining the effects various proteins may have on these B-cell populations in terms of proliferation and differentiation. Listed below are two assays designed to allow for the detection of the differentiation, proliferation, or inhibition of B-cell populations and their precursors.

[1072] In Vitro Assay—Agonists or antagonists of the invention can be assessed for its ability to induce activation, proliferation, differentiation or inhibition and/or death in B-cell populations and their precursors. The activity of the agonists or antagonists of the invention on purified human tonsillar B cells, measured qualitatively over the dose range from 0.1 to 10,000 ng/mL, is assessed in a standard B-lymphocyte co-stimulation assay in which purified tonsillar B cells are cultured in the presence of either formalin-fixed Staphylococcus aureus Cowan I (SAC) or immobilized anti-human IgM antibody as the priming agent. Second signals such as IL-2 and IL-15 synergize with SAC and IgM crosslinking to elicit B cell proliferation as measured by tritiated-thymidine incorporation. Novel synergizing agents can be readily identified using this assay. The assay involves isolating human tonsillar B cells by magnetic bead (MACS) depletion of CD3-positive cells. The resulting cell population is greater than 95% B cells as assessed by expression of CD45R(B220).

[1073] Various dilutions of each sample are placed into individual wells of a 96-well plate to which are added 10⁵ B-cells suspended in culture medium (RPMI 1640 containing 10% FBS, 5×10⁻⁵M 2ME, 100U/ml penicillin, 10 ug/ml streptomycin, and 10⁻⁵ dilution of SAC) in a total volume of 150 ul. Proliferation or inhibition is quantitated by a 20 h pulse (1 uCi/well) with 3H-thymidine (6.7 Ci/mM) beginning 72 h post factor addition. The positive and negative controls are IL2 and medium respectively.

[1074] In vivo Assay—BALB/c mice are injected (i.p.) twice per day with buffer only, or 2 mg/Kg of agonists or antagonists of the invention, or truncated forms thereof. Mice receive this treatment for 4 consecutive days, at which time they are sacrificed and various tissues and serum collected for analyses. Comparison of H&E sections from normal spleens and spleens treated with agonists or antagonists of the invention identify the results of the activity of the agonists or antagonists on spleen cells, such as the diffusion of peri-arterial lymphatic sheaths, and/or significant increases in the nucleated cellularity of the red pulp regions, which may indicate the activation of the differentiation and proliferation of B-cell populations. Immunohistochemical studies using a B cell marker, anti-CD45R(B220), are used to determine whether any physiological changes to splenic cells, such as splenic disorganization, are due to increased B-cell representation within loosely defined B-cell zones that infiltrate established T-cell regions.

[1075] Flow cytometric analyses of the spleens from mice treated with agonist or antagonist is used to indicate whether the agonists or antagonists specifically increases the proportion of ThB+, CD45R(B220)dull-B cells over that which is observed in control mice.

[1076] Likewise, a predicted consequence of increased mature B-cell representation in vivo is a relative increase in serum Ig titers. Accordingly, serum IgM and IgA levels are compared between buffer and agonists or antagonists-treated mice.

[1077] The studies described in this example tested activity of agonists or antagonists of the invention. However, one skilled in the art could easily modify the exemplified studies to test the activity of polynucleotides or polypeptides of the invention (e.g., gene therapy).

### Example 22

### T Cell Proliferation Assay

[1078] A CD3-induced proliferation assay is performed on PBMCs and is measured by the uptake of ³H-thymidine. The assay is performed as follows. Ninety-six well plates are coated with 100 μl/well of mAb to CD3 (HIT3a, Pharmingen) or isotype-matched control mAb (B33.1) overnight at 4 degrees C. (1 μg/ml in 0.05M bicarbonate buffer, pH 9.5), then washed three times with PBS. PBMC are isolated by F/H gradient centrifugation from human peripheral blood and added to quadruplicate wells (5×10⁴/well) of mAb coated plates in RPMI containing 10% FCS and P/S in the presence of varying concentrations of agonists or antagonists of the invention (total volume 200 ul). Relevant protein buffer and medium alone are controls. After 48 hr. culture at 37 degrees C., plates are spun for 2 min. at 1000 rpm and 100 μl of supernatant is removed and stored −20 degrees C. for measurement of IL-2 (or other cytokines) if effect on proliferation is observed. Wells are supplemented with 100 ul of medium containing 0.5 uCi of ³H-thymidine and cultured at 37 degrees C. for 18-24 hr. Wells are harvested and incorporation of H-thymidine used as a measure of proliferation. Anti-CD3 alone is the positive control for proliferation. IL-2 (100 U/ml) is also used as a control which enhances proliferation. Control antibody which does not induce proliferation of T cells is used as the negative control for the effects of agonists or antagonists of the invention.

[1079] The studies described in this example tested activity of agonists or antagonists of the invention. However, one skilled in the art could easily modify the exemplified studies to test the activity of polynucleotides or polypeptides of the invention (e.g., gene therapy).

### Example 23

### Effect of Agonists or Antagonists of the Invention on the Expression of MHC Class II, Costimulatory and Adhesion Molecules and Cell Differentiation of Monocytes and Monocyte-Derived Human Dendritic Cells

[1080] Dendritic cells are generated by the expansion of proliferating precursors found in the peripheral blood: adherent PBMC or elutriated monocytic fractions are cultured for 7-10 days with GM-CSF (50 ng/ml) and IL-4 (20 ng/ml). These dendritic cells have the characteristic phenotype of immature cells (expression of CD1, CD80, CD86, CD40 and MHC class II antigens). Treatment with activating factors, such as TNF-α, causes a rapid change in surface phenotype (increased expression of MHC class I and II, costimulatory and adhesion molecules, downregulation of FCγ RII, upregulation of CD83). These changes correlate with increased antigen-presenting capacity and with functional maturation of the dendritic cells.

[1081] FACS analysis of surface antigens is performed as follows. Cells are treated 1-3 days with increasing concentrations of agonist or antagonist of the invention or LPS (positive control), washed with PBS containing 1% BSA and 0.02 mM sodium azide, and then incubated with 1:20 dilution of appropriate FITC— or PE-labeled monoclonal antibodies for 30 minutes at 4 degrees C. After an additional wash, the labeled cells are analyzed by flow cytometry on a FACScan (Becton Dickinson).

[1082] Effect on the production of cytokines. Cytokines generated by dendritic cells, in particularIL-12, are important in the initiation of T-cell dependent immune responses. IL-12 strongly influences the development of Th1 helper T-cell immune response, and induces cytotoxic T and NK cell function. An ELISA is used to measure the IL-12 release as follows. Dendritic cells (10⁶/ml) are treated with increasing concentrations of agonists or antagonists of the invention for 24 hours. LPS (100 ng/ml) is added to the cell culture as positive control. Supernatants from the cell cultures are then collected and analyzed for IL-12 content using commercial ELISA kit (e.g., R & D Systems (Minneapolis, Minn.)). The standard protocols provided with the kits are used.

[1083] Effect on the expression of MHC Class II, costimulatory and adhesion molecules. Three major families of cell surface antigens can be identified on monocytes: adhesion molecules, molecules involved in antigen presentation, and Fc receptor. Modulation of the expression of MHC class II antigens and other costimulatory molecules, such as B7 and ICAM-1, may result in changes in the antigen presenting capacity of monocytes and ability to induce T cell activation. Increased expression of Fc receptors may correlate with improved monocyte cytotoxic activity, cytokine release and phagocytosis.

[1084] FACS analysis is used to examine the surface antigens as follows. Monocytes are treated 1-5 days with increasing concentrations of agonists or antagonists of the invention or LPS (positive control), washed with PBS containing 1% BSA and 0.02 mM sodium azide, and then incubated with 1:20 dilution of appropriate FITC— or PE-labeled monoclonal antibodies for 30 minutes at 4 degrees C. After an additional wash, the labeled cells are analyzed by flow cytometry on a FACScan (Becton Dickinson).

[1085] Monocyte activation and/or increased survival. Assays for molecules that activate (or alternatively, inactivate) monocytes and/or increase monocyte survival (or alternatively, decrease monocyte survival) are known in the art and may routinely be applied to determine whether a molecule of the invention functions as an inhibitor or activator of monocytes. Agonists or antagonists of the invention can be screened using the three assays described below. For each of these assays, Peripheral blood mononuclear cells (PBMC) are purified from single donor leukopacks (American Red Cross, Baltimore, Md.) by centrifugation through a Histopaque gradient (Sigma). Monocytes are isolated from PBMC by counterflow centrifugal elutriation.

[1086] Monocyte Survival Assay. Human peripheral blood monocytes progressively lose viability when cultured in absence of serum or other stimuli. Their death results from internally regulated processes (apoptosis). Addition to the culture of activating factors, such as TNF-alpha dramatically improves cell survival and prevents DNA fragmentation. Propidium iodide (PI) staining is used to measure apoptosis as follows. Monocytes are cultured for 48 hours in polypropylene tubes in serum-free medium (positive control), in the presence of 100 ng/ml TNF-alpha (negative control), and in the presence of varying concentrations of the compound to be tested. Cells are suspended at a concentration of 2×10⁶/ml in PBS containing PI at a final concentration of 5 μg/ml, and then incubated at room temperature for 5 minutes before FACScan analysis. PI uptake has been demonstrated to correlate with DNA fragmentation in this experimental paradigm.

[1087] Effect on cytokine release. An important function of monocytes/macrophages is their regulatory activity on other cellular populations of the immune system through the release of cytokines after stimulation. An ELISA to measure cytokine release is performed as follows. Human monocytes are incubated at a density of 5×10⁵ cells/ml with increasing concentrations of agonists or antagonists of the invention and under the same conditions, but in the absence of agonists or antagonists. For IL-12 production, the cells are primed overnight with IFN (100 U/ml) in the presence of agonist or antagonist of the invention. LPS (10 ng/ml) is then added. Conditioned media are collected after 24 h and kept frozen until use. Measurement of TNF-alpha, IL-10, MCP-1 and IL-8 is then performed using a commercially available ELISA kit (e.g., R & D Systems (Minneapolis, Minn.)) and applying the standard protocols provided with the kit.

[1088] Oxidative burst. Purified monocytes are plated in 96-w plate at 2-1×10⁵ cell/well. Increasing concentrations of agonists or antagonists of the invention are added to the wells in a total volume of 0.2 ml culture medium (RPMI 1640+10% FCS, glutamine and antibiotics). After 3 days incubation, the plates are centrifuged and the medium is removed from the wells. To the macrophage monolayers, 0.2 ml per well of phenol red solution (140 mM NaCl, 10 mM potassium phosphate buffer pH 7.0, 5.5 mM dextrose, 0.56 mM phenol red and 19 U/ml of HRPO) is added, together with the stimulant (200 nM PMA). The plates are incubated at 37° C. for 2 hours and the reaction is stopped by adding 20 μl 1N NaOH per well. The absorbance is read at 610 nm. To calculate the amount of H₂O₂ produced by the macrophages, a standard curve of a H₂O₂ solution of known molarity is performed for each experiment.

[1089] The studies described in this example tested activity of agonists or antagonists of the invention. However, one skilled in the art could easily modify the exemplified studies to test the activity of polynucleotides or polypeptides of the invention (e.g., gene therapy).

### Example 24

### Biological Effects of Agonists or Antagonists of the Invention Astrocyte and Neuronal Assays

[1090] Agonists or antagonists of the invention, expressed in Escherichia coli and purified as described above, can be tested for activity in promoting the survival, neurite outgrowth, or phenotypic differentiation of cortical neuronal cells and for inducing the proliferation of glial fibrillary acidic protein immunopositive cells, astrocytes. The selection of cortical cells for the bioassay is based on the prevalent expression of FGF-1 and FGF-2 in cortical structures and on the previously reported enhancement of cortical neuronal survival resulting from FGF-2 treatment. A thymidine incorporation assay, for example, can be used to elucidate an agonist or antagonist of the invention's activity on these cells.

[1091] Moreover, previous reports describing the biological effects of FGF-2 (basic FGF) on cortical or hippocampal neurons in vitro have demonstrated increases in both neuron survival and neurite outgrowth (Walicke et al., “Fibroblast growth factor promotes survival of dissociated hippocampal neurons and enhances neurite extension.” Proc. Natl. Acad. Sci. USA 83:3012-3016. (1986), assay herein incorporated by reference in its entirety). However, reports from experiments done on PC-12 cells suggest that these two responses are not necessarily synonymous and may depend on not only which FGF is being tested but also on which receptor(s) are expressed on the target cells. Using the primary cortical neuronal culture paradigm, the ability of an agonist or antagonist of the invention to induce neurite outgrowth can be compared to the response achieved with FGF-2 using, for example, a thymidine incorporation assay.

[1092] Fibroblast and Endothelial Cell Assays

[1093] Human lung fibroblasts are obtained from Clonetics (San Diego, Calif.) and maintained in growth media from Clonetics. Dermal microvascular endothelial cells are obtained from Cell Applications (San Diego, Calif.). For proliferation assays, the human lung fibroblasts and dermal microvascular endothelial cells can be cultured at 5,000 cells/well in a 96-well plate for one day in growth medium. The cells are then incubated for one day in 0.1% BSA basal medium. After replacing the medium with fresh 0.1% BSA medium, the cells are incubated with the test proteins for 3 days. Alamar Blue (Alamar Biosciences, Sacramento, Calif.) is added to each well to a final concentration of 10%. The cells are incubated for 4 hr. Cell viability is measured by reading in a CytoFluor fluorescence reader. For the PGE₂ assays, the human lung fibroblasts are cultured at 5,000 cells/well in a 96-well plate for one day. After a medium change to 0.1% BSA basal medium, the cells are incubated with FGF-2 or agonists or antagonists of the invention with or without IL-1α for 24 hours. The supernatants are collected and assayed for PGE₂ by EIA kit (Cayman, Ann Arbor, Mich.). For the IL-6 assays, the human lung fibroblasts are cultured at 5,000 cells/well in a 96-well plate for one day. After a medium change to 0.1% BSA basal medium, the cells are incubated with FGF-2 or with or without agonists or antagonists of the invention IL-1α for 24 hours. The supernatants are collected and assayed for IL-6 by ELISA kit (Endogen, Cambridge, Mass.).

[1094] Human lung fibroblasts are cultured with FGF-2 or agonists or antagonists of the invention for 3 days in basal medium before the addition of Alamar Blue to assess effects on growth of the fibroblasts. FGF-2 should show a stimulation at 10-2500 ng/ml which can be used to compare stimulation with agonists or antagonists of the invention.

[1095] Parkinson Models.

[1096] The loss of motor function in Parkinson's disease is attributed to a deficiency of striatal dopamine resulting from the degeneration of the nigrostriatal dopaminergic projection neurons. An animal model for Parkinson's that has been extensively characterized involves the systemic administration of 1-methyl-4 phenyl 1,2,3,6-tetrahydropyridine (MPTP). In the CNS, MPTP is taken-up by astrocytes and catabolized by monoamine oxidase B to 1-methyl-4-phenyl pyridine (MPP⁺) and released. Subsequently, MPP⁺ is actively accumulated in dopaminergic neurons by the high-affinity reuptake transporter for dopamine. MPP⁺ is then concentrated in mitochondria by the electrochemical gradient and selectively inhibits nicotidamide adenine disphosphate: ubiquinone oxidoreductionase (complex I), thereby interfering with electron transport and eventually generating oxygen radicals.

[1097] It has been demonstrated in tissue culture paradigms that FGF-2 (basic FGF) has trophic activity towards nigral dopaminergic neurons (Ferrari et al., Dev. Biol. 1989). Recently, Dr. Unsicker's group has demonstrated that administering FGF-2 in gel foam implants in the stnatum results in the near complete protection of nigral dopaminergic neurons from the toxicity associated with MPTP exposure (Otto and Unsicker, J. Neuroscience, 1990).

[1098] Based on the data with FGF-2, agonists or antagonists of the invention can be evaluated to determine whether it has an action similar to that of FGF-2 in enhancing dopaminergic neuronal survival in vitro and it can also be tested in vivo for protection of dopaminergic neurons in the striatum from the damage associated with MPTP treatment. The potential effect of an agonist or antagonist of the invention is first examined in vitro in a dopaminergic neuronal cell culture paradigm. The cultures are prepared by dissecting the midbrain floor plate from gestation day 14 Wistar rat embryos. The tissue is dissociated with trypsin and seeded at a density of 200,000 cells/cm² on polyorthinine-laminin coated glass coverslips. The cells are maintained in Dulbecco's Modified Eagle's medium and F12 medium containing hormonal supplements (NI). The cultures are fixed with paraformaldehyde after 8 days in vitro and are processed for tyrosine hydroxylase, a specific marker for dopaminergic neurons, immunohistochemical staining. Dissociated cell cultures are prepared from embryonic rats. The culture medium is changed every third day and the factors are also added at that time.

[1099] Since the dopaminergic neurons are isolated from animals at gestation day 14, a developmental time which is past the stage when the dopaminergic precursor cells are proliferating, an increase in the number of tyrosine hydroxylase immunopositive neurons would represent an increase in the number of dopaminergic neurons surviving in vitro. Therefore, if an agonist or antagonist of the invention acts to prolong the survival of dopaminergic neurons, it would suggest that the agonist or antagonist may be involved in Parkinson's Disease.

[1100] The studies described in this example tested activity of agonists or antagonists of the invention. However, one skilled in the art could easily modify the exemplified studies to test the activity of polynucleotides or polypeptides of the invention (e.g., gene therapy).

### Example 25

### The Effect of Agonists or Antagonists of the Invention on the Growth of Vascular Endothelial Cells

[1101] On day 1, human umbilical vein endothelial cells (HUVEC) are seeded at 2-5×10⁴ cells/35 mm dish density in Ml99 medium containing 4% fetal bovine serum (FBS), 16 units/ml heparin, and 50 units/ml endothelial cell growth supplements (ECGS, Biotechnique, Inc.). On day 2, the medium is replaced with M199 containing 10% FBS, 8 units/ml heparin. An agonist or antagonist of the invention, and positive controls, such as VEGF and basic FGF (bFGF) are added, at varying concentrations. On days 4 and 6, the medium is replaced. On day 8, cell number is determined with a Coulter Counter.

[1102] An increase in the number of HUVEC cells indicates that the compound of the invention may proliferate vascular endothelial cells, while a decrease in the number of HUVEC cells indicates that the compound of the invention inhibits vascular endothelial cells.

[1103] The studies described in this example tested activity of a polypeptide of the invention. However, one skilled in the art could easily modify the exemplified studies to test the activity of polynucleotides (e.g., gene therapy), agonists, and/or antagonists of the invention.

### Example 26

### Rat Corneal Wound Healing Model

[1104] This animal model shows the effect of an agonist or antagonist of the invention on neovascularization. The experimental protocol includes:

[1105] a) Making a 1-1.5 mm long incision from the center of cornea into the stromal layer.

[1106] b) Inserting a spatula below the lip of the incision facing the outer corner of the eye.

[1107] c) Making a pocket (its base is 1-1.5 mm form the edge of the eye).

[1108] d) Positioning a pellet, containing 50 ng-5 ug of an agonist or antagonist of the invention, within the pocket.

[1109] e) Treatment with an agonist or antagonist of the invention can also be applied topically to the corneal wounds in a dosage range of 20 mg-500 mg (daily treatment for five days).

[1110] The studies described in this example tested activity of agonists or antagonists of the invention. However, one skilled in the art could easily modify the exemplified studies to test the activity of polynucleotides or polypeptides of the invention (e.g., gene therapy).

### Example 27

### Diabetic Mouse and Glicocorticoid-Impaired Wound Healing Models

[1111] Diabetic db+/db+ Mouse Model.

[1112] To demonstrate that an agonist or antagonist of the invention accelerates the healing process, the genetically diabetic mouse model of wound healing is used. The full thickness wound healing model in the db+/db+ mouse is a well characterized, clinically relevant and reproducible model of impaired wound healing. Healing of the diabetic wound is dependent on formation of granulation tissue and re-epithelialization rather than contraction (Gartner, M. H. et al., J. Surg. Res. 52:389 (1992); Greenhalgh, D. G. et al., Am. J. Pathol. 136:1235 (1990)).

[1113] The diabetic animals have many of the characteristic features observed in Type II diabetes mellitus. Homozygous (db+/db+) mice are obese in comparison to their normal heterozygous (db+/+m) littermates. Mutant diabetic (db+/db+) mice have a single autosomal recessive mutation on chromosome 4 (db+) (Coleman et al. Proc. Natl. Acad. Sci. USA 77:283-293 (1982)). Animals show polyphagia, polydipsia and polyuria. Mutant diabetic mice (db+/db+) have elevated blood glucose, increased or normal insulin levels, and suppressed cell-mediated immunity (Mandel et al., J. Immunol. 120:1375 (1978); Debray-Sachs, M. et al., Clin. Exp. Immunol. 51(1):1-7 (1983); Leiter et al., Am. J. of Pathol. 114:46-55 (1985)). Peripheral neuropathy, myocardial complications, and microvascular lesions, basement membrane thickening and glomerular filtration abnormalities have been described in these animals (Norido, F. et al., Exp. Neurol. 83(2):221-232 (1984); Robertson et al., Diabetes 29(1):60-67 (1980); Giacomelli et al., Lab Invest. 40(4):460-473 (1979); Coleman, D. L., Diabetes 31 (Suppl):1-6 (1982)). These homozygous diabetic mice develop hyperglycemia that is resistant to insulin analogous to human type II diabetes (Mandel et al., J. Immunol. 120:1375-1377 (1978)).

[1114] The characteristics observed in these animals suggests that healing in this model may be similar to the healing observed in human diabetes (Greenhalgh, et al., Am. J. of Pathol. 136:1235-1246 (1990)).

[1115] Genetically diabetic female C57BL/KsJ (db+/db+) mice and their non-diabetic (db+/+m) heterozygous littermates are used in this study (Jackson Laboratories). The animals are purchased at 6 weeks of age and are 8 weeks old at the beginning of the study. Animals are individually housed and received food and water ad libitum. All manipulations are performed using aseptic techniques. The experiments are conducted according to the rules and guidelines of Human Genome Sciences, Inc. Institutional Animal Care and Use Committee and the Guidelines for the Care and Use of Laboratory Animals.

[1116] Wounding protocol is performed according to previously reported methods (Tsuboi, R. and Rifkin, D. B., J. Exp. Med. 172:245-251 (1990)). Briefly, on the day of wounding, animals are anesthetized with an intraperitoneal injection of Avertin (0.01 mg/mL), 2,2,2-tribromoethanol and 2-methyl-2-butanol dissolved in deionized water. The dorsal region of the animal is shaved and the skin washed with 70% ethanol solution and iodine. The surgical area is dried with sterile gauze prior to wounding. An 8 mm full-thickness wound is then created using a Keyes tissue punch. Immediately following wounding, the surrounding skin is gently stretched to eliminate wound expansion. The wounds are left open for the duration of the experiment. Application of the treatment is given topically for 5 consecutive days commencing on the day of wounding. Prior to treatment, wounds are gently cleansed with sterile saline and gauze sponges.

[1117] Wounds are visually examined and photographed at a fixed distance at the day of surgery and at two day intervals thereafter. Wound closure is determined by daily measurement on days 1-5 and on day 8. Wounds are measured horizontally and vertically using a calibrated Jameson caliper. Wounds are considered healed if granulation tissue is no longer visible and the wound is covered by a continuous epithelium.

[1118] An agonist or antagonist of the invention is administered using at a range different doses, from 4 mg to 500 mg per wound per day for 8 days in vehicle. Vehicle control groups received 50 mL of vehicle solution.

[1119] Animals are euthanized on day 8 with an intraperitoneal injection of sodium pentobarbital (300 mg/kg). The wounds and surrounding skin are then harvested for histology and immunohistochemistry. Tissue specimens are placed in 10% neutral buffered formalin in tissue cassettes between biopsy sponges for further processing.

[1120] Three groups of 10 animals each (5 diabetic and 5 non-diabetic controls) are evaluated: 1) Vehicle placebo control, 2) untreated group, and 3) treated group.

[1121] Wound closure is analyzed by measuring the area in the vertical and horizontal axis and obtaining the total square area of the wound. Contraction is then estimated by establishing the differences between the initial wound area (day 0) and that of post treatment (day 8). The wound area on day 1 is 64 mm², the corresponding size of the dermal punch. Calculations are made using the following formula:

[Open area on day 8]−[Open area on day 1]/[Open area on day 1]

[1122] Specimens are fixed in 10% buffered formalin and paraffin embedded blocks are sectioned perpendicular to the wound surface (5 mm) and cut using a Reichert-Jung microtome. Routine hematoxylin-eosin (H&E) staining is performed on cross-sections of bisected wounds. Histologic examination of the wounds are used to assess whether the healing process and the morphologic appearance of the repaired skin is altered by treatment with an agonist or antagonist of the invention. This assessment included verification of the presence of cell accumulation, inflammatory cells, capillaries, fibroblasts, re-epithelialization and epidermal maturity (Greenhalgh, D. G. et al., Am. J. Pathol. 136:1235 (1990)). A calibrated lens micrometer is used by a blinded observer.

[1123] Tissue sections are also stained immunohistochemically with a polyclonal rabbit anti-human keratin antibody using ABC Elite detection system. Human skin is used as a positive tissue control while non-immune IgG is used as a negative control. Keratinocyte growth is determined by evaluating the extent of reepithelialization of the wound using a calibrated lens micrometer.

[1124] Proliferating cell nuclear antigen/cyclin (PCNA) in skin specimens is demonstrated by using anti-PCNA antibody (1:50) with an ABC Elite detection system. Human colon cancer served as a positive tissue control and human brain tissue is used as a negative tissue control. Each specimen included a section with omission of the primary antibody and substitution with non-immune mouse IgG. Ranking of these sections is based on the extent of proliferation on a scale of 0-8, the lower side of the scale reflecting slight proliferation to the higher side reflecting intense proliferation.

[1125] Experimental data are analyzed using an unpaired t test. A p value of <0.05 is considered significant.

[1126] Steroid Impaired Rat Model

[1127] The inhibition of wound healing by steroids has been well documented in various in vitro and in vivo systems (Wahl, Glucocorticoids and Wound healing. In: Anti-Inflammatory Steroid Action: Basic and Clinical Aspects. 280-302 (1989); Wahlet al., J. Immunol.-115: 476-481 (1975); Werb et al., J. Exp. Med. 147:1684-1694 (1978)). Glucocorticoids retard wound healing by inhibiting angiogenesis, decreasing vascular permeability (Ebert et al., An. Intern. Med. 37:701-705 (1952)), fibroblast proliferation, and collagen synthesis (Beck et al., Growth Factors. 5: 295-304 (1991); Haynes et al., J. Clin. Invest. 61: 703-797 (1978)) and producing a transient reduction of circulating monocytes (Haynes et al., J. Clin. Invest. 61: 703-797 (1978); Wahl, “Glucocorticoids and wound healing”, In: Antiinflammatory Steroid Action: Basic and Clinical Aspects, Academic Press, New York, pp. 280-302 (1989)). The systemic administration of steroids to impaired wound healing is a well establish phenomenon in rats (Beck et al., Growth Factors. 5: 295-304 (1991); Haynes et al., J. Clin. Invest. 61: 703-797 (1978); Wahl, “Glucocorticoids and wound healing”, In: Antiinflammatory Steroid Action: Basic and Clinical Aspects, Academic Press, New York, pp. 280-302 (1989); Pierce et al., Proc. Natl. Acad. Sci. USA 86: 2229-2233 (1989)).

[1128] To demonstrate that an agonist or antagonist of the invention can accelerate the healing process, the effects of multiple topical applications of the agonist or antagonist on full thickness excisional skin wounds in rats in which healing has been impaired by the systemic administration of methylprednisolone is assessed.

[1129] Young adult male Sprague Dawley rats weighing 250-300 g (Charles River Laboratories) are used in this example. The animals are purchased at 8 weeks of age and are 9 weeks old at the beginning of the study. The healing response of rats is impaired by the systemic administration of methylprednisolone (17 mg/kg/rat intramuscularly) at the time of wounding. Animals are individually housed and received food and water ad libitum. All manipulations are performed using aseptic techniques. This study is conducted according to the rules and guidelines of Human Genome Sciences, Inc. Institutional Animal Care and Use Committee and the Guidelines for the Care and Use of Laboratory Animals.

[1130] The wounding protocol is followed according to section A, above. On the day of wounding, animals are anesthetized with an intramuscular injection of ketamine (50 mg/kg) and xylazine (5 mg/kg). The dorsal region of the animal is shaved and the skin washed with 70% ethanol and iodine solutions. The surgical area is dried with sterile gauze prior to wounding. An 8 mm full-thickness wound is created using a Keyes tissue punch. The wounds are left open for the duration of the experiment. Applications of the testing materials are given topically once a day for 7 consecutive days commencing on the day of wounding and subsequent to methylprednisolone administration. Prior to treatment, wounds are gently cleansed with sterile saline and gauze sponges.

[1131] Wounds are visually examined and photographed at a fixed distance at the day of wounding and at the end of treatment. Wound closure is determined by daily measurement on days 1-5 and on day 8. Wounds are measured horizontally and vertically using a calibrated Jameson caliper. Wounds are considered healed if granulation tissue is no longer visible and the wound is covered by a continuous epithelium.

[1132] The agonist or antagonist of the invention is administered using at a range different doses, from 4 mg to 500 mg per wound per day for 8 days in vehicle. Vehicle control groups received 50 mL of vehicle solution.

[1133] Animals are euthanized on day 8 with an intraperitoneal injection of sodium pentobarbital (300 mg/kg). The wounds and surrounding skin are then harvested for histology. Tissue specimens are placed in 10% neutral buffered formalin in tissue cassettes between biopsy sponges for further processing.

[1134] Three groups of 10 animals each (5 with methylprednisolone and 5 without glucocorticoid) are evaluated: 1) Untreated group 2) Vehicle placebo control 3) treated groups.

[1135] Wound closure is analyzed by measuring the area in the vertical and horizontal axis and obtaining the total area of the wound. Closure is then estimated by establishing the differences between the initial wound area (day 0) and that of post treatment (day 8). The wound area on day 1 is 64 mm², the corresponding size of the dermal punch. Calculations are made using the following formula:

[Open area on day 8]−[Open area on day 1]/[Open area on day 1]

[1136] Specimens are fixed in 10% buffered formalin and paraffin embedded blocks are sectioned perpendicular to the wound surface (5 mm) and cut using an Olympus microtome. Routine hematoxylin-eosin (H&E) staining is performed on cross-sections of bisected wounds. Histologic examination of the wounds allows assessment of whether the healing process and the morphologic appearance of the repaired skin is improved by treatment with an agonist or antagonist of the invention. A calibrated lens micrometer is used by a blinded observer to determine the distance of the wound gap.

[1137] Experimental data are analyzed using an unpaired t test. A p value of <0.05 is considered significant.

[1138] The studies described in this example tested activity of agonists or antagonists of the invention. However, one skilled in the art could easily modify the exemplified studies to test the activity of polynucleotides or polypeptides of the invention (e.g., gene therapy).

### Example 28

### Lymphadema Animal Model

[1139] The purpose of this experimental approach is to create an appropriate and consistent lymphedema model for testing the therapeutic effects of an agonist or antagonist of the invention in lymphangiogenesis and re-establishment of the lymphatic circulatory system in the rat hind limb. Effectiveness is measured by swelling volume of the affected limb, quantification of the amount of lymphatic vasculature, total blood plasma protein, and histopathology. Acute lymphedema is observed for 7-10 days. Perhaps more importantly, the chronic progress of the edema is followed for up to 3-4 weeks.

[1140] Prior to beginning surgery, blood sample is drawn for protein concentration analysis. Male rats weighing approximately ˜350 g are dosed with Pentobarbital. Subsequently, the right legs are shaved from knee to hip. The shaved area is swabbed with gauze soaked in 70% EtOH. Blood is drawn for serum total protein testing. Circumference and volumetric measurements are made prior to injecting dye into paws after marking 2 measurement levels (0.5 cm above heel, at mid-pt of dorsal paw). The intradermal dorsum of both right and left paws are injected with 0.05 ml of 1% Evan's Blue. Circumference and volumetric measurements are then made following injection of dye into paws.

[1141] Using the knee joint as a landmark, a mid-leg inguinal incision is made circumferentially allowing the femoral vessels to be located. Forceps and hemostats are used to dissect and separate the skin flaps. After locating the femoral vessels, the lymphatic vessel that runs along side and underneath the vessel(s) is located. The main lymphatic vessels in this area are then electrically coagulated or suture ligated.

[1142] Using a microscope, muscles in back of the leg (near the semitendinosis and adductors) are bluntly dissected. The popliteal lymph node is then located. The 2 proximal and 2 distal lymphatic vessels and distal blood supply of the popliteal node are then ligated by suturing. The popliteal lymph node, and any accompanying adipose tissue, is then removed by cutting connective tissues.

[1143] Care is taken to control any mild bleeding resulting from this procedure. After lymphatics are occluded, the skin flaps are sealed by using liquid skin (Vetbond) (AJ Buck). The separated skin edges are sealed to the underlying muscle tissue while leaving a gap of 0.5 cm around the leg. Skin also may be anchored by suturing to underlying muscle when necessary.

[1144] To avoid infection, animals are housed individually with mesh (no bedding). Recovering animals are checked daily through the optimal edematous peak, which typically occurred by day 5-7. The plateau edematous peak are then observed. To evaluate the intensity of the lymphedema, the circumference and volumes of 2 designated places on each paw before operation and daily for 7 days are measured. The effect of plasma proteins on lymphedema is determined and whether protein analysis is a useful testing perimeter is also investigated. The weights of both control and edematous limbs are evaluated at 2 places. Analysis is performed in a blind manner.

[1145] Circumference Measurements: Under brief gas anesthetic to prevent limb movement, a cloth tape is used to measure limb circumference. Measurements are done at the ankle bone and dorsal paw by 2 different people and those 2 readings are averaged. Readings are taken from both control and edematous limbs.

[1146] Volumetric Measurements: On the day of surgery, animals are anesthetized with Pentobarbital and are tested prior to surgery. For daily volumetrics animals are under brief halothane anesthetic (rapid immobilization and quick recovery), and both legs are shaved and equally marked using waterproof marker on legs. Legs are first dipped in water, then dipped into instrument to each marked level then measured by Buxco edema software(Chen/Victor). Data is recorded by one person, while the other is dipping the limb to marked area.

[1147] Blood-plasma protein measurements: Blood is drawn, spun, and serum separated prior to surgery and then at conclusion for total protein and Ca2⁺ comparison.

[1148] Limb Weight Comparison: After drawing blood, the animal is prepared for tissue collection. The limbs are amputated using a quillitine, then both experimental and control legs are cut at the ligature and weighed. A second weighing is done as the tibio-cacaneal joint is disarticulated and the foot is weighed.

[1149] Histological Preparations: The transverse muscle located behind the knee (popliteal) area is dissected and arranged in a metal mold, filled with freezegel, dipped into cold methylbutane, placed into labeled sample bags at −80EC until sectioning. Upon sectioning, the muscle is observed under fluorescent microscopy for lymphatics.

[1150] The studies described in this example tested activity of agonists or antagonists of the invention. However, one skilled in the art could easily modify the exemplified studies to test the activity of polynucleotides or polypeptides of the invention (e.g., gene therapy).

### Example 29

### Suppression of TNF alpha-induced adhesion molecule expression by an Agonist or Antagonist of the Invention

[1151] The recruitment of lymphocytes to areas of inflammation and angiogenesis involves specific receptor-ligand interactions between cell surface adhesion molecules (CAMs) on lymphocytes and the vascular endothelium. The adhesion process, in both normal and pathological settings, follows a multi-step cascade that involves intercellular adhesion molecule-1 (ICAM-1), vascular cell adhesion molecule-1 (VCAM-1), and endothelial leukocyte adhesion molecule-1 (E-selectin) expression on endothelial cells (EC). The expression of these molecules and others on the vascular endothelium determines the efficiency with which leukocytes may adhere to the local vasculature and extravasate into the local tissue during the development of an inflammatory response. The local concentration of cytokines and growth factor participate in the modulation of the expression of these CAMs.

[1152] Tumor necrosis factor alpha (TNF-a), a potent proinflammatory cytokine, is a stimulator of all three CAMs on endothelial cells and may be involved in a wide variety of inflammatory responses, often resulting in a pathological outcome.

[1153] The potential of an agonist or antagonist of the invention to mediate a suppression of TNF-a induced CAM expression can be examined. A modified ELISA assay which uses ECs as a solid phase absorbent is employed to measure the amount of CAM expression on TNF-a treated ECs when co-stimulated with a member of the FGF family of proteins.

[1154] To perform the experiment, human umbilical vein endothelial cell (HUVEC) cultures are obtained from pooled cord harvests and maintained in growth medium (EGM-2; Clonetics, San Diego, Calif.) supplemented with 10% FCS and 1% penicillin/streptomycin in a 37 degree C. humidified incubator containing 5% CO₂. HUVECs are seeded in 96-well plates at concentrations of 1×10⁴ cells/well in EGM medium at 37 degree C. for 18-24 hrs or until confluent. The monolayers are subsequently washed 3 times with a serum-free solution of RPMI-1640 supplemented with 100 U/ml penicillin and 100 mg/ml streptomycin, and treated with a given cytokine and/or growth factor(s) for 24 h at 37 degree C. Following incubation, the cells are then evaluated for CAM expression.

[1155] Human Umbilical Vein Endothelial cells (HUVECs) are grown in a standard 96 well plate to confluence. Growth medium is removed from the cells and replaced with 90 ul of 199 Medium (10% FBS). Samples for testing and positive or negative controls are added to the plate in triplicate (in 10 ul volumes). Plates are incubated at 37 degree C. for either 5 h (selectin and integrin expression) or 24 h (integrin expression only). Plates are aspirated to remove medium and 100 μl of 0.1% paraformaldehyde-PBS(with Ca++ and Mg++) is added to each well. Plates are held at 4° C. for 30 min.

[1156] Fixative is then removed from the wells and wells are washed 1×with PBS(+Ca,Mg)+0.5% BSA and drained. Do not allow the wells to dry. Add 10 μl of diluted primary antibody to the test and control wells. Anti-ICAM-1-Biotin, Anti-VCAM-1-Biotin and Anti-E-selectin-Biotin are used at a concentration of 10 μg/ml (1:10 dilution of 0.1 mg/ml stock antibody). Cells are incubated at 37° C. for 30 min. in a humidified environment. Wells are washed X3 with PBS(+Ca,Mg)+0.5% BSA.

[1157] Then add 20 μl of diluted ExtrAvidin-Alkaline Phosphotase (1:5,000 dilution) to each well and incubated at 37° C. for 30 min. Wells are washed X3 with PBS(+Ca,Mg)+0.5% BSA. 1 tablet of p-Nitrophenol Phosphate pNPP is dissolved in 5 ml of glycine buffer (pH 10.4). 100 μl of pNPP substrate in glycine buffer is added to each test well. Standard wells in triplicate are prepared from the working dilution of the ExtrAvidin-Alkaline Phosphotase in glycine buffer: 1:5,000 (10⁰)>10^{-0.5}>10⁻¹>10^{-1 5}0.5 μl of each dilution is added to triplicate wells and the resulting AP content in each well is 5.50 ng, 1.74 ng, 0.55 ng, 0.18 ng. 100 μl of pNNP reagent must then be added to each of the standard wells. The plate must be incubated at 37° C. for 4 h. A volume of 50 μl of 3M NaOH is added to all wells. The results are quantified on a plate reader at 405 nm. The background subtraction option is used on blank wells filled with glycine buffer only. The template is set up to indicate the concentration of AP-conjugate in each standard well [5.50 ng; 1.74 ng; 0.55 ng; 0.18 ng]. Results are indicated as amount of bound AP-conjugate in each sample.

[1158] The studies described in this example tested activity of agonists or antagonists of the invention. However, one skilled in the art could easily modify the exemplified studies to test the activity of polynucleotides or polypeptides of the invention (e.g., gene therapy).

### Example 30

### Production of Polypeptide of the Invention for High-Throughput Screening Assays

[1159] The following protocol produces a supernatant containing polypeptide of the present invention to be tested. This supernatant can then be used in the Screening Assays described in Examples 32-41.

[1160] First, dilute Poly-D-Lysine (644 587 Boehringer-Mannheim) stock solution (1 mg/ml in PBS) 1:20 in PBS (w/o calcium or magnesium 17-516F Biowhittaker) for a working solution of 50 ug/ml. Add 200 ul of this solution to each well (24 well plates) and incubate at RT for 20 minutes. Be sure to distribute the solution over each well (note: a 12-channel pipetter may be used with tips on every other channel). Aspirate off the Poly-D-Lysine solution and rinse with 1 ml PBS (Phosphate Buffered Saline). The PBS should remain in the well until just prior to plating the cells and plates may be poly-lysine coated in advance for up to two weeks.

[1161] Plate 293T cells (do not carry cells past P+20) at 2×10⁵ cells/well in 0.5 ml DMEM(Dulbecco's Modified Eagle Medium)(with 4.5 G/L glucose and L-glutamine (12-604F Biowhittaker))/10% heat inactivated FBS(14-503 F Biowhittaker)/1×Penstrep(17-602E Biowhittaker). Let the cells grow overnight.

[1162] The next day, mix together in a sterile solution basin: 300 ul Lipofectamine (18324-012 Gibco/BRL) and 5 ml Optimem 1 (31985070 Gibco/BRL)/96-well plate. With a small volume multi-channel pipetter, aliquot approximately 2 ug of an expression vector containing a polynucleotide insert, produced by the methods described in Examples 8-10, into an appropriately labeled 96-well round bottom plate. With a multi-channel pipetter, add 50 ul of the Lipofectamine/Optimem I mixture to each well. Pipette up and down gently to mix. Incubate at RT 15-45 minutes. After about 20 minutes, use a multi-channel pipetter to add 150 ul Optimem I to each well. As a control, one plate of vector DNA lacking an insert should be transfected with each set of transfections.

[1163] Preferably, the transfection should be performed by tag-teaming the following tasks. By tag-teaming, hands on time is cut in half, and the cells do not spend too much time on PBS. First, person A aspirates off the media from four 24-well plates of cells, and then person B rinses each well with 0.5-1 ml PBS. Person A then aspirates off PBS rinse, and person B, using al2-channel pipetter with tips on every other channel, adds the 200 ul of DNA/Lipofectamine/Optimem I complex to the odd wells first, then to the even wells, to each row on the 24-well plates. Incubate at 37 degree C. for 6 hours.

[1164] While cells are incubating, prepare appropriate media, either 1%BSA in DMEM with 1×penstrep, or HGS CHO-5 media (116.6 mg/L of CaCl₂ (anhyd); 0.00130 mg/L CuSO₄.5H₂O; 0.050 mg/L of Fe(NO₃)₃-9H₂O; 0.417 mg/L of FeSO₄.7H₂O; 311.80 mg/L of Kcl; 28.64 mg/L of MgCl₂; 48.84 mg/L of MgSO4; 6995.50 mg/L of NaCl; 2400.0 mg/L of NaHCO₃; 62.50 mg/L of NaH₂PO₄—H₂O; 71.02 mg/L of Na₂HPO4; 0.4320 mg/L of ZnSO₄.7H₂O; 0.002 mg/L of Arachidonic Acid; 1.022 mg/L of Cholesterol; 0.070 mg/L of DL-alpha-Tocopherol-Acetate; 0.0520 mg/L of Linoleic Acid; 0.010 mg/L of Linolenic Acid; 0.010 mg/L of Myristic Acid; 0.010 mg/L of Oleic Acid; 0.010 mg/L of Palmitric Acid; 0.010 mg/L of Palmitic Acid; 100 mg/L of Pluronic F-68; 0.010 mg/L of Stearic Acid; 2.20 mg/L of Tween 80; 4551 mg/L of D-Glucose; 130.85 mg/ml of L-Alanine; 147.50 mg/ml of L-Arginine-HCL; 7.50 mg/ml of L-Asparagine-H₂O; 6.65 mg/ml of L-Aspartic Acid; 29.56 mg/ml of L-Cystine-2HCL-H₂O; 31.29 mg/ml of L-Cystine-2HCL; 7.35 mg/ml of L-Glutamic Acid; 365.0 mg/ml of L-Glutamine; 18.75 mg/ml of Glycine; 52.48 mg/ml of L-Histidine-HCL-H₂O; 106.97 mg/ml of L-Isoleucine; 111.45 mg/ml of L-Leucine; 163.75 mg/ml of L-Lysine HCL; 32.34 mg/ml of L-Methionine; 68.48 mg/ml of L-Phenylalainine; 40.0 mg/ml of L-Proline; 26.25 mg/ml of L-Serine; 101.05 mg/ml of L-Threonine; 19.22 mg/ml of L-Tryptophan; 91.79 mg/ml of L-Tryrosine-2Na-2H₂O; and 99.65 mg/ml of L-Valine; 0.0035 mg/L of Biotin; 3.24 mg/L of D-Ca Pantothenate; 11.78 mg/L of Choline Chloride; 4.65 mg/L of Folic Acid; 15.60 mg/L of i-Inositol; 3.02 mg/L of Niacinamide; 3.00 mg/L of Pyridoxal HCL; 0.031 mg/L of Pyridoxine HCL; 0.319 mg/L of Riboflavin; 3.17 mg/L of Thiamine HCL; 0.365 mg/L of Thymidine; 0.680 mg/L of Vitamin B₁₂; 25 mM of HEPES Buffer; 2.39 mg/L of Na Hypoxanthine; 0.105 mg/L of Lipoic Acid; 0.081 mg/L of Sodium Putrescine-2HCL; 55.0 mg/L of Sodium Pyruvate; 0.0067 mg/L of Sodium Selenite; 20 uM of Ethanolamine; 0.122 mg/L of Ferric Citrate; 41.70 mg/L of Methyl-B-Cyclodextrin complexed with Linoleic Acid; 33.33 mg/L of Methyl-B-Cyclodextrin complexed with Oleic Acid; 10 mg/L of Methyl-B-Cyclodextrin complexed with Retinal Acetate. Adjust osmolarity to 327 mOsm) with 2 mm glutamine and 1×penstrep. (BSA (81-068-3 Bayer) 100 gm dissolved in IL DMEM for a 10% BSA stock solution). Filter the media and collect 50 ul for endotoxin assay in 15 ml polystyrene conical.

[1165] The transfection reaction is terminated, preferably by tag-teaming, at the end of the incubation period. Person A aspirates off the transfection media, while person B adds 1.5 ml appropriate media to each well. Incubate at 37 degree C. for 45 or 72 hours depending on the media used: 1%BSA for 45 hours or CHO-5 for 72 hours.

[1166] On day four, using a 300 ul multichannel pipetter, aliquot 600 μl in one iml deep well plate and the remaining supernatant into a 2 ml deep well. The supernatants from each well can then be used in the assays described in Examples 32-39.

[1167] It is specifically understood that when activity is obtained in any of the assays described below using a supernatant, the activity originates from either the polypeptide of the present invention directly (e.g., as a secreted protein) or by polypeptide of the present invention inducing expression of other proteins, which are then secreted into the supernatant. Thus, the invention further provides a method of identifying the protein in the supernatant characterized by an activity in a particular assay.

### Example 31

### Construction of GAS Reporter Construct

[1168] One signal transduction pathway involved in the differentiation and proliferation of cells is called the Jaks-STATs pathway. Activated proteins in the Jaks-STATs pathway bind to gamma activation site “GAS” elements or interferon-sensitive responsive element (“ISRE”), located in the promoter of many genes. The binding of a protein to these elements alter the expression of the associated gene.

[1169] GAS and ISRE elements are recognized by a class of transcription factors called Signal Transducers and Activators of Transcription, or “STATs.” There are six members of the STATs family. Stat1 and Stat3 are present in many cell types, as is Stat2 (as response to IFN-alpha is widespread). Stat4 is more restricted and is not in many cell types though it has been found in T helper class I, cells after treatment with IL-12. Stat5 was originally called mammary growth factor, but has been found at higher concentrations in other cells including myeloid cells. It can be activated in tissue culture cells by many cytokines.

[1170] The STATs are activated to translocate from the cytoplasm to the nucleus upon tyrosine phosphorylation by a set of kinases known as the Janus Kinase (“Jaks”) family. Jaks represent a distinct family of soluble tyrosine kinases and include Tyk2, Jak1, Jak2, and Jak3. These kinases display significant sequence similarity and are generally catalytically inactive in resting cells.

[1171] The Jaks are activated by a wide range of receptors summarized in the Table below. (Adapted from review by Schidler and Darnell, Ann. Rev. Biochem. 64:621-51 (1995)). A cytokine receptor family, capable of activating Jaks, is divided into two groups: (a) Class 1 includes receptors for IL-2, IL-3, IL-4, IL-6, IL-7, IL-9, IL-11, IL-12, IL-15, Epo, PRL, GH, G-CSF, GM-CSF, LIF, CNTF, and thrombopoietin; and (b) Class 2 includes IFN-a, IFN-g, and IL-10. The Class 1 receptors share a conserved cysteine motif (a set of four conserved cysteines and one tryptophan) and a WSXWS motif (a membrane proximal region encoding Trp-Ser-Xaa-Trp-Ser (SEQ ID NO: 2)).

[1172] Thus, on binding of a ligand to a receptor, Jaks are activated, which in turn activate STATs, which then translocate and bind to GAS elements. This entire process is encompassed in the Jaks-STATs signal transduction pathway. Therefore, activation of the Jaks-STATs pathway, reflected by the binding of the GAS or the ISRE element, can be used to indicate proteins involved in the proliferation and differentiation of cells. For example, growth factors and cytokines are known to activate the Jaks-STATs pathway (See Table below). Thus, by using GAS elements linked to reporter molecules, activators of the Jaks-STATs pathway can be identified.

| | | JAKs | | | | |
|---|---|---|---|---|---|---|
| Ligand | tyk2 | Jak1 | Jak2 | Jak3 | STATS | GAS(elements) or ISRE |
| IFN family | | | | | | |
| IFN-a/B | + | + | − | − | 1, 2, 3 | ISRE |
| IFN-g | | + | + | − | 1 | GAS (IRF1 > Lys6 > IFP) |
| Il-10 | + | ? | ? | − | 1, 3 | |
| gp 130 family | | | | | | |
| IL-6 (Pleiotropic) | + | + | + | ? | 1, 3 | GAS (IRF1 > Lys6 > IFP) |
| Il-11 (Pleiotropic) | ? | + | ? | ? | 1, 3 | |
| OnM (Pleiotropic) | ? | + | + | ? | 1, 3 | |
| LIF (Pleiotropic) | ? | + | + | ? | 1, 3 | |
| CNTF (Pleiotropic) | −/+ | + | + | ? | 1, 3 | |
| G-CSF (Pleiotropic) | ? | + | ? | ? | 1, 3 | |
| IL-12 (Pleiotropic) | + | − | + | + | 1, 3 | |
| g-C family | | | | | | |
| IL-2 (lymphocytes) | − | + | − | + | 1, 3, 5 | GAS |
| IL-4 (lymph/myeloid) | − | + | − | + | 6 | GAS (IRFL = IFP >> Ly6)(IgH) |
| IL-7 (lymphocytes) | − | + | − | + | 5 | GAS |
| IL-9 (lymphocytes) | − | + | − | + | 5 | GAS |
| IL-13 (lymphocyte) | − | + | ? | ? | 6 | GAS |
| IL-15 | ? | + | ? | + | 5 | GAS |
| gp 140 family | | | | | | |
| IL-3 (myeloid) | − | − | + | − | 5 | GAS (IRF1 > IFP >> Ly6) |
| IL-5 (mycloid) | − | − | + | − | 5 | GAS |
| GM-CSF (myeloid) | − | − | + | − | 5 | GAS |
| Growth hormone family | | | | | | |
| GH | ? | − | + | − | 5 | |
| PRL | ? | +/− | + | − | 1, 3, 5 | |
| EPO | ? | − | + | − | 5 | GAS (B-CAS > IRF1 = IFP >> Ly6) |
| Receptor Tyrosine Kinases | | | | | | |
| EGF | ? | + | + | − | 1, 3 | GAS (IRF1) |
| PDGF | ? | + | + | − | 1, 3 | |
| CSF-1 | ? | + | + | − | 1, 3 | GAS (not IRF1) |

[1173] To construct a synthetic GAS containing promoter element, which is used in the Biological Assays described in Examples 32-33, a PCR based strategy is employed to generate a GAS-SV40 promoter sequence. The 5′ primer contains four tandem copies of the GAS binding site found in the IRF1 promoter and previously demonstrated to bind STATs upon induction with a range of cytokines (Rothman et al., Immunity 1:457-468 (1994).), although other GAS or ISRE elements can be used instead. The 5′ primer also contains 18 bp of sequence complementary to the SV40 early promoter sequence and is flanked with an XhoI site. The sequence of the 5′ primer is:

| | |
|---|---|
| 5′:GCGCCTCGAGATTTCCCCGAAATCTAGATTTCCCCGAAATGATTTCCCCGAAAT | (SEQ ID NO: 3) |
| GATTTCCCCGAAATATCTGCCATCTCAATTAG:3′ | |

[1174] The downstream primer is complementary to the SV40 promoter and is flanked with a Hind III site: 5′:GCGGCAAGCTTTTTGCAAAGCCTAGGC:3′ (SEQ ID NO: 4)

[1175] PCR amplification is performed using the SV40 promoter template present in the B-gal:promoter plasmid obtained from Clontech. The resulting PCR fragment is digested with XhoI/Hind III and subcloned into BLSK2-. (Stratagene.) Sequencing with forward and reverse primers confirms that the insert contains the following sequence:

| | |
|---|---|
| 5′:CTCGAGATTTCCCCGAAATCTAGATTTCCCCGAAATGATTTCCCCGAAATGATT | (SEQ ID NO: 5) |
| TCCCCGAAATATCTGCCATCTCAATTAGTCAGCAACCATAGTCCCGCCCCTAACT | |
| CCGCCCATCCCGCCCCTAACTCCGCCCAGTTCCGCCCATTCTCCGCCCCATGGCTG | |
| ACTAATTTTTTTTATTTATGCAGAGGCCGAGGCCGCCTCGGCCTCTGAGCTATTCC | |
| AGAAGTAGTGAGGAGGCTTTTTTGGAGGCCTAGGCTTTTGCAAAAAGCTT3′ | |

[1176] With this GAS promoter element linked to the SV40 promoter, a GAS:SEAP2 reporter construct is next engineered. Here, the reporter molecule is a secreted alkaline phosphatase, or “SEAP.” Clearly, however, any reporter molecule can be instead of SEAP, in this or in any of the other Examples. Well known reporter molecules that can be used instead of SEAP include chloramphenicol acetyltransferase (CAT), luciferase, alkaline phosphatase, B-galactosidase, green fluorescent protein (GFP), or any protein detectable by an antibody.

[1177] The above sequence confirmed synthetic GAS-SV40 promoter element is subcloned into the pSEAP-Promoter vector obtained from Clontech using HindIII and XhoI, effectively replacing the SV40 promoter with the amplified GAS:SV40 promoter element, to create the GAS-SEAP vector. However, this vector does not contain a neomycin resistance gene, and therefore, is not preferred for mammalian expression systems.

[1178] Thus, in order to generate mammalian stable cell lines expressing the GAS-SEAP reporter, the GAS-SEAP cassette is removed from the GAS-SEAP vector using SalI and NotI, and inserted into a backbone vector containing the neomycin resistance gene, such as pGFP-1 (Clontech), using these restriction sites in the multiple cloning site, to create the GAS-SEAP/Neo vector. Once this vector is transfected into mammalian cells, this vector can then be used as a reporter molecule for GAS binding as described in Examples 32-33.

[1179] Other constructs can be made using the above description and replacing GAS with a different promoter sequence. For example, construction of reporter molecules containing EGR and NF-KB promoter sequences are described in Examples 34 and 35. However, many other promoters can be substituted using the protocols described in these Examples. For instance, SRE, IL-2, NFAT, or Osteocalcin promoters can be substituted, alone or in combination (e.g., GASINF-KB/EGR, GAS/NF-KB, 1l-2/NFAT, or NF-KB/GAS). Similarly, other cell lines can be used to test reporter construct activity, such as HELA (epithelial), HUVEC (endothelial), Reh (B-cell), Saos-2 (osteoblast), HUVAC (aortic), or Cardiomyocyte.

### Example 32

### High-Throughput Screening Assay for T-cell Activity

[1180] The following protocol is used to assess T-cell activity by identifying factors, and determining whether supernate containing a polypeptide of the invention proliferates and/or differentiates T-cells. T-cell activity is assessed using the GAS/SEAP/Neo construct produced in Example 31. Thus, factors that increase SEAP activity indicate the ability to activate the Jaks-STATS signal transduction pathway. The T-cell used in this assay is Jurkat T-cells (ATCC Accession No. TIB-152), although Molt-3 cells (ATCC Accession No. CRL-1552) and Molt-4 cells (ATCC Accession No. CRL-1582) cells can also be used.

[1181] Jurkat T-cells are lymphoblastic CD4+ Th1 helper cells. In order to generate stable cell lines, approximately 2 million Jurkat cells are transfected with the GAS-SEAP/neo vector using DMRIE-C (Life Technologies)(transfection procedure described below). The transfected cells are seeded to a density of approximately 20,000 cells per well and transfectants resistant to 1 mg/ml genticin selected. Resistant colonies are expanded and then tested for their response to increasing concentrations of interferon gamma. The dose response of a selected clone is demonstrated.

[1182] Specifically, the following protocol will yield sufficient cells for 75 wells containing 200 ul of cells. Thus, it is either scaled up, or performed in multiple to generate sufficient cells for multiple 96 well plates. Jurkat cells are maintained in RPMI+10% serum with 1% Pen-Strep. Combine 2.5 mls of OPTI-MEM (Life Technologies) with 10 ug of plasmid DNA in a T25 flask. Add 2.5 ml OPTI-MEM containing 50 ul of DMRIE-C and incubate at room temperature for 15-45 mins.

[1183] During the incubation period, count cell concentration, spin down the required number of cells (10⁷ per transfection), and resuspend in OPTI-MEM to a final concentration of 10⁷ cells/ml. Then add 1 ml of 1×10⁷ cells in OPTI-MEM to T25 flask and incubate at 37 degree C. for 6 hrs. After the incubation, add 10 ml of RPMI+15% serum.

[1184] The Jurkat:GAS-SEAP stable reporter lines are maintained in RPMI+10% serum, 1 mg/ml Genticin, and 1% Pen-Strep. These cells are treated with supernatants containing polypeptide of the present invention or polypeptide of the present invention induced polypeptides as produced by the protocol described in Example 30.

[1185] On the day of treatment with the supernatant, the cells should be washed and resuspended in fresh RPMI+10% serum to a density of 500,000 cells per ml. The exact number of cells required will depend on the number of supernatants being screened. For one 96 well plate, approximately 10 million cells (for 10 plates, 100 million cells) are required.

[1186] Transfer the cells to a triangular reservoir boat, in order to dispense the cells into a 96 well dish, using a 12 channel pipette. Using a 12 channel pipette, transfer 200 ul of cells into each well (therefore adding 100, 000 cells per well).

[1187] After all the plates have been seeded, 50 ul of the supernatants are transferred directly from the 96 well plate containing the supernatants into each well using a 12 channel pipette. In addition, a dose of exogenous interferon gamma (0.1, 1.0, 10 ng) is added to wells H9, H110, and H11 to serve as additional positive controls for the assay.

[1188] The 96 well dishes containing Jurkat cells treated with supernatants are placed in an incubator for 48 hrs (note: this time is variable between 48-72 hrs). 35 ul samples from each well are then transferred to an opaque 96 well plate using a 12 channel pipette. The opaque plates should be covered (using sellophene covers) and stored at −20 degree C. until SEAP assays are performed according to Example 36. The plates containing the remaining treated cells are placed at 4 degree C. and serve as a source of material for repeating the assay on a specific well if desired.

[1189] As a positive control, 100 Unit/ml interferon gamma can be used which is known to activate Jurkat T cells. Over 30 fold induction is typically observed in the positive control wells.

[1190] The above protocol may be used in the generation of both transient, as well as, stable transfected cells, which would be apparent to those of skill in the art.

### Example 33

### High-Throughput Screening Assay Identifying Myeloid Activity

[1191] The following protocol is used to assess myeloid activity of polypeptide of the present invention by determining whether polypeptide of the present invention proliferates and/or differentiates myeloid cells. Myeloid cell activity is assessed using the GAS/SEAP/Neo construct produced in Example 31. Thus, factors that increase SEAP activity indicate the ability to activate the Jaks-STATS signal transduction pathway. The myeloid cell used in this assay is U937, a pre-monocyte cell line, although TF-1, HL60, or KGI can be used.

[1192] To transiently transfect U937 cells with the GAS/SEAP/Neo construct produced in Example 31, a DEAE-Dextran method (Kharbanda et. al., 1994, Cell Growth & Differentiation, 5:259-265) is used. First, harvest 2×10⁷ U937 cells and wash with PBS. The U937 cells are usually grown in RPMI 1640 medium containing 10% heat-inactivated fetal bovine serum (FBS) supplemented with 100 units/ml penicillin and 100 mg/ml streptomycin.

[1193] Next, suspend the cells in 1 ml of 20 mM Tris-HCl (pH 7.4) buffer containing 0.5 mg/ml DEAE-Dextran, 8 ug GAS-SEAP2 plasmid DNA, 140 mM NaCl, 5 mM KCl, 375 uM Na₂HPO₄.7H₂O, 1 mM MgCl₂, and 675 uM CaCl₂. Incubate at 37 degrees C. for 45 min.

[1194] Wash the cells with RPMI 1640 medium containing 10% FBS and then resuspend in 10 ml complete medium and incubate at 37 degree C. for 36 hr.

[1195] The GAS-SEAP/U937 stable cells are obtained by growing the cells in 400 ug/ml G418. The G418-free medium is used for routine growth but every one to two months, the cells should be re-grown in 400 ug/ml G418 for couple of passages.

[1196] These cells are tested by harvesting 1×10⁸ cells (this is enough for ten 96-well plates assay) and wash with PBS. Suspend the cells in 200 ml above described growth medium, with a final density of 5×10⁵ cells/ml. Plate 200 ul cells per well in the 96-well plate (or 1×10⁵ cells/well).

[1197] Add 50 ul of the supernatant prepared by the.protocol described in Example 30. Incubate at 37 degee C for 48 to 72 hr. As a positive control, 100 Unit/ml interferon gamma can be used which is known to activate U937 cells. Over 30 fold induction is typically observed in the positive control wells. SEAP assay the supernatant according to the protocol described in Example 36.

### Example 34

### High-Throughput Screening Assay Identifying Neuronal Activity.

[1198] When cells undergo differentiation and proliferation, a group of genes are activated through many different signal transduction pathways. One of these genes, EGR1 (early growth response gene 1), is induced in various tissues and cell types upon activation. The promoter of EGR1 is responsible for such induction. Using the EGR1 promoter linked to reporter molecules, activation of cells can be assessed by polypeptide of the present invention.

[1199] Particularly, the following protocol is used to assess neuronal activity in PC12 cell lines. PC12 cells (rat phenochromocytoma cells) are known to proliferate and/or differentiate by activation with a number of mitogens, such as TPA (tetradecanoyl phorbol acetate), NGF (nerve growth factor), and EGF (epidermal growth factor). The EGR1 gene expression is activated during this treatment. Thus, by stably transfecting PC12 cells with a construct containing an EGR promoter linked to SEAP reporter, activation of PC12 cells by poltpeptide of the present invention can be assessed.

[1200] The EGR/SEAP reporter construct can be assembled by the following protocol. The EGR-1 promoter sequence (−633 to +1)(Sakamoto K et al., Oncogene 6:867-871 (1991)) can be PCR amplified from human genomic DNA using the following primers:

(SEQ ID NO: 6)

5′ GCGCTCGAGGGATGACAGCGATAGAACCCCGG-3′

(SEQ ID NO: 7)

5′ GCGAAGCTTCGCGACTCCCCGGATCCGCCTC-3′

[1201] Using the GAS:SEAP/Neo vector produced in Example 31, EGR1 amplified product can then be inserted into this vector. Linearize the GAS:SEAP/Neo vector using restriction enzymes XhoI/HindIII, removing the GAS/SV40 stuffer. Restrict the EGR1 amplified product with these same enzymes. Ligate the vector and the EGR1 promoter.

[1202] To prepare 96 well-plates for cell culture, two mls of a coating solution (1:30 dilution of collagen type I (Upstate Biotech Inc. Cat#08-115) in 30% ethanol (filter sterilized)) is added per one 10 cm plate or 50 ml per well of the 96-well plate, and allowed to air dry for 2 hr.

[1203] PC12 cells are routinely grown in RPMI-1640 medium (Bio Whittaker) containing 10% horse serum (JRH BIOSCIENCES, Cat. # 12449-78P), 5% heat-inactivated fetal bovine serum (FBS) supplemented with 100 units/ml penicillin and 100 ug/ml streptomycin on a precoated 10 cm tissue culture dish. One to four split is done every three to four days. Cells are removed from the plates by scraping and resuspended with pipetting up and down for more than 15 times.

[1204] Transfect the EGR/SEAP/Neo construct into PC12 using the Lipofectamine protocol described in Example 30. EGR-SEAP/PC12 stable cells are obtained by growing the cells in 300 ug/ml G418. The G418-free medium is used for routine growth but every one to two months, the cells should be re-grown in 300 ug/ml G418 for couple of passages.

[1205] To assay for neuronal activity, a 10 cm plate with cells around 70 to 80% confluent is screened by removing the old medium. Wash the cells once with PBS (Phosphate buffered saline). Then starve the cells in low serum medium (RPMI-1640 containing 1% horse serum and 0.5% FBS with antibiotics) overnight.

[1206] The next morning, remove the medium and wash the cells with PBS. Scrape off the cells from the plate, suspend the cells well in 2 ml low serum medium. Count the cell number and add more low serum medium to reach final cell density as 5×10⁵ cells/ml.

[1207] Add 200 ul of the cell suspension to each well of 96-well plate (equivalent to 1×10⁵ cells/well). Add 50 ul supernatant produced by Example 30, 37 degree C. for 48 to 72 hr. As a positive control, a growth factor known to activate PC12 cells through EGR can be used, such as 50 ng/ul of Neuronal Growth Factor (NGF). Over fifty-fold induction of SEAP is typically seen in the positive control wells. SEAP assay the supernatant according to Example 36.

### Example 35

### High-Throughput Screening Assay for T-cell Activity

[1208] NF-KB (Nuclear Factor KB) is a transcription factor activated by a wide variety of agents including the inflammatory cytokines IL-1 and TNF, CD3O and CD40, lymphotoxin-alpha and lymphotoxin-beta, by exposure to LPS or thrombin, and by expression of certain viral gene products. As a transcription factor, NF-KB regulates the expression of genes involved in immune cell activation, control of apoptosis (NF— KB appears to shield cells from apoptosis), B and T-cell development, anti-viral and antimicrobial responses, and multiple stress responses.

[1209] In non-stimulated conditions, NF-KB is retained in the cytoplasm with I-KB (Inhibitor KB). However, upon stimulation, I-KB is phosphorylated and degraded, causing NF-KB to shuttle to the nucleus, thereby activating transcription of target genes. Target genes activated by NF-KB include IL-2, IL-6, GM-CSF, ICAM-1 and class 1 MHC.

[1210] Due to its central role and ability to respond to a range of stimuli, reporter constructs utilizing the NF-KB promoter element are used to screen the supernatants produced in Example 30. Activators or inhibitors of NF-KB would be useful in treating, preventing, and/or diagnosing diseases. For example, inhibitors of NF-KB could be used to treat those diseases related to the acute or chronic activation of NF-KB, such as rheumatoid arthritis.

[1211] To construct a vector containing the NF-KB promoter element, a PCR based strategy is employed. The upstream primer contains four tandem copies of the NF-KB binding site (GGGGACTTTCCC) (SEQ ID NO: 8), 18 bp of sequence complementary to the 5′ end of the SV40 early promoter sequence, and is flanked with an XhoI site:

| | |
|---|---|
| 5′:GCGGCCTCGAGGGGACTTTCCCGGGGACTTTCCGGGGACTTTCCGGGACTTTC | (SEQ ID NO: 9) |
| CATCCTGCCATCTCAATTAG:3′ | |

[1212] The downstream primer is complementary to the 3′ end of the SV40 promoter and is flanked with a Hind III site:

5′:GCGGCAAGCTTTTTGCAAAGCCTAGGC:3′ (SEQ ID NO: 4)

[1213] PCR amplification is performed using the SV40 promoter template present in the pB-gal:promoter plasmid obtained from Clontech. The resulting PCR fragment is digested with XhoI and Hind III and subcloned into BLSK2-. (Stratagene) Sequencing with the T7 and T3 primers confirms the insert contains the following sequence:

| | |
|---|---|
| 5′:CTCGAGGGGACTTTCCCGGGGACTTTCCGGGGACTTTCCGGGACTTTCCATCTG | (SEQ ID NO: 10) |
| CCATCTCAATTAGTCAGCAACCATAGTCCCGCCCCTAACTCCGCCCATCCCGCCC | |
| CTAACTCCGCCCAGTTCCGCCCATTCTCCGCCCCATGGCTGACTAATTTTTTTTAT | |
| TTATGCAGAGGCCGAGGCCGCCTCGGCCTCTGAGCTATTCCAGAAGTAGTGAGG | |
| AGGCTTTTTTGGAGGCCTAGGCTTTTGCAAAAAGCTT:3′ | |

[1214] Next, replace the SV40 minimal promoter element present in the pSEAP2-promoter plasmid (Clontech) with this NF-KB/SV40 fragment using XhoI and HindIII. However, this vector does not contain a neomycin resistance gene, and therefore, is not preferred for mammalian expression systems.

[1215] In order to generate stable mammalian cell lines, the NF-KB/SV40/SEAP cassette is removed from the above NF-KB/SEAP vector using restriction enzymes SalI and NotI, and inserted into a vector containing neomycin resistance. Particularly, the NF-KB/SV40/SEAP cassette was inserted into pGFP-1 (Clontech), replacing the GFP gene, after restricting pGFP—I with SalI and NotI.

[1216] Once NF-KB/SV40/SEAP/Neo vector is created, stable Jurkat T-cells are created and maintained according to the protocol described in Example 32. Similarly, the method for assaying supernatants with these stable Jurkat T-cells is also described in Example 32. As a positive control, exogenous TNF alpha (0.1, 1, 10 ng) is added to wells H9, H 10, and H11, with a 5-10 fold activation typically observed.

### Example 36

### Assay for SEAP Activity

[1217] As a reporter molecule for the assays described in Examples 32-35, SEAP activity is assayed using the Tropix Phospho-light Kit (Cat. BP-400) according to the following general procedure. The Tropix Phospho-light Kit supplies the Dilution, Assay, and Reaction Buffers used below.

[1218] Prime a dispenser with the 2.5×Dilution Buffer and dispense 15 ul of 2.5×dilution buffer into Optiplates containing 35 ul of a supernatant. Seal the plates with a plastic sealer and incubate at 65 degree C. for 30 min. Separate the Optiplates to avoid uneven heating.

[1219] Cool the samples to room temperature for 15 minutes. Empty the dispenser and prime with the Assay Buffer. Add 50 ml Assay Buffer and incubate at room temperature 5 min. Empty the dispenser and prime with the Reaction Buffer (see the Table below). Add 50 ul Reaction Buffer and incubate at room temperature for 20 minutes. Since the intensity of the chemiluminescent signal is time dependent, and it takes about 10 minutes to read 5 plates on a luminometer, thus one should treat 5 plates at each time and start the second set 10 minutes later.

[1220] Read the relative light unit in the luminometer. Set H12 as blank, and print the results. An increase in chemiluminescence indicates reporter activity.

Reaction Buffer Formulation:

| # of plates | Rxn buffer diluent (ml) | CSPD (ml) |
|---|---|---|
| 10 | 60 | 3 |
| 11 | 65 | 3.25 |
| 12 | 70 | 3.5 |
| 13 | 75 | 3.75 |
| 14 | 80 | 4 |
| 15 | 85 | 4.25 |
| 16 | 90 | 4.5 |
| 17 | 95 | 4.75 |
| 18 | 100 | 5 |
| 19 | 105 | 5.25 |
| 20 | 110 | 5.5 |
| 21 | 115 | 5.75 |
| 22 | 120 | 6 |
| 23 | 125 | 6.25 |
| 24 | 130 | 6.5 |
| 25 | 135 | 6.75 |
| 26 | 140 | 7 |
| 27 | 145 | 7.25 |
| 28 | 150 | 7.5 |
| 29 | 155 | 7.75 |
| 30 | 160 | 8 |
| 31 | 165 | 8.25 |
| 32 | 170 | 8.5 |
| 33 | 175 | 8.75 |
| 34 | 180 | 9 |
| 35 | 185 | 9.25 |
| 36 | 190 | 9.5 |
| 37 | 195 | 9.75 |
| 38 | 200 | 10 |
| 39 | 205 | 10.25 |
| 40 | 210 | 10.5 |
| 41 | 215 | 10.75 |
| 42 | 220 | 11 |
| 43 | 225 | 11.25 |
| 44 | 230 | 11.5 |
| 45 | 235 | 11.75 |
| 46 | 240 | 12 |
| 47 | 245 | 12.25 |
| 48 | 250 | 12.5 |
| 49 | 255 | 12.75 |
| 50 | 260 | 13 |

### Example 37

### High-Throughput Screening Assay Identifying Changes in Small Molecule Concentration and Membrane Permeability

[1221] Binding of a ligand to a receptor is known to alter intracellular levels of small molecules, such as calcium, potassium, sodium, and pH, as well as alter membrane potential. These alterations can be measured in an assay to identify supernatants which bind to receptors of a particular cell. Although the following protocol describes an assay for calcium, this protocol can easily be modified to detect changes in potassium, sodium, pH, membrane potential, or any other small molecule which is detectable by a fluorescent probe.

[1222] The following assay uses Fluorometric Imaging Plate Reader (“FLlPR”) to measure changes in fluorescent molecules (Molecular Probes) that bind small molecules. Clearly, any fluorescent molecule detecting a small molecule can be used instead of the calcium fluorescent molecule, fluo-4 (Molecular Probes, Inc.; catalog no. F-14202), used here.

[1223] For adherent cells, seed the cells at 10,000-20,000 cells/well in a Co-star black 96-well plate with clear bottom. The plate is incubated in a CO₂ incubator for 20 hours. The adherent cells are washed two times in Biotek washer with 200 ul of HBSS (Hank's Balanced Salt Solution) leaving 100 ul of buffer after the final wash.

[1224] A stock solution of 1 mg/ml fluo-4 is made in 10% pluronic acid DMSO. To load the cells with fluo-4, 50 ul of 12 ug/ml fluo-4 is added to each well. The plate is incubated at 37 degrees C. in a CO₂ incubator for 60 min. The plate is washed four times in the Biotek washer with HBSS leaving 100 ul of buffer.

[1225] For non-adherent cells, the cells are spun down from culture media. Cells are re-suspended to 2-5×10⁶ cells/ml with HBSS in a 50-mi conical tube. 4 ul of 1 mg/ml fluo-4 solution in 10% pluronic acid DMSO is added to each ml of cell suspension. The tube is then placed in a 37 degrees C. water bath for 30-60 min. The cells are washed twice with HBSS, resuspended to 1×10⁶ cells/ml, and dispensed into a microplate, 100 ul/well. The plate is centrifuged at 1000 rpm for 5 min. The plate is then washed once in Denley Cell Wash with 200 ul, followed by an aspiration step to 100 ul final volume.

[1226] For a non-cell based assay, each well contains a fluorescent molecule, such as fluo-4. The supernatant is added to the well, and a change in fluorescence is detected.

[1227] To measure the fluorescence of intracellular calcium, the FLIPR is set for the following parameters: (1) System gain is 300-800 mW; (2) Exposure time is 0.4 second; (3) Camera F/stop is F/2; (4) Excitation is 488 nm; (5) Emission is 530 nm; and (6) Sample addition is 50 ul. Increased emission at 530 nm indicates an extracellular signaling event caused by the a molecule, either polypeptide of the present invention or a molecule induced by polypeptide of the present invention, which has resulted in an increase in the intracellular Ca⁺⁺ concentration.

### Example 38

### High-Throughput Screening Assay Identifying Tyrosine Kinase Activity

[1228] The Protein Tyrosine Kinases (PTK) represent a diverse group of transmembrane and cytoplasmic kinases. Within the Receptor Protein Tyrosine Kinase RPTK) group are receptors for a range of mitogenic and metabolic growth factors including the PDGF, FGF, EGF, NGF, HGF and Insulin receptor subfamilies. In addition there are a large family of RPTKs for which the corresponding ligand is unknown. Ligands for RPTKs include mainly secreted small proteins, but also membrane-bound and extracellular matrix proteins.

[1229] Activation of RPTK by ligands involves ligand-mediated receptor dimerization, resulting in transphosphorylation of the receptor subunits and activation of the cytoplasmic tyrosine kinases. The cytoplasmic tyrosine kinases include receptor associated tyrosine kinases of the src-family (e.g., src, yes, Ick, lyn, fyn) and non-receptor linked and cytosolic protein tyrosine kinases, such as the Jak family, members of which mediate signal transduction triggered by the cytokine superfamily of receptors (e.g., the Interleukins, Interferons, GM-CSF, and Leptin).

[1230] Because of the wide range of known factors capable of stimulating tyrosine kinase activity, identifying whether polypeptide of the present invention or a molecule induced by polypeptide of the present invention is capable of activating tyrosine kinase signal transduction pathways is of interest. Therefore, the following protocol is designed to identify such molecules capable of activating the tyrosine kinase signal transduction pathways.

[1231] Seed target cells (e.g., primary keratinocytes) at a density of approximately 25,000 cells per well in a 96 well Loprodyne Silent Screen Plates purchased from Nalge Nunc (Naperville, Ill.). The plates are sterilized with two 30 minute rinses with 100% ethanol, rinsed with water and dried overnight. Some plates are coated for 2 hr with 100 ml of cell culture grade type I collagen (50 mg/ml), gelatin (2%) or polylysine (50 mg/ml), all of which can be purchased from Sigma Chemicals (St. Louis, Mo.) or 10% Matrigel purchased from Becton Dickinson (Bedford, Mass.), or calf serum, rinsed with PBS and stored at 4 degree C. Cell growth on these plates is assayed by seeding 5,000 cells/well in growth medium and indirect quantitation of cell number through use of alamarBlue as described by the manufacturer Alamar Biosciences, Inc. (Sacramento, Calif.) after 48 hr. Falcon plate covers #3071 from Becton Dickinson (Bedford,MA) are used to cover the Loprodyne Silent Screen Plates. Falcon Microtest III cell culture plates can also be used in some proliferation experiments.

[1232] To prepare extracts, A431 cells are seeded onto the nylon membranes of Loprodyne plates (20,000/200mUwell) and cultured overnight in complete medium. Cells are quiesced by incubation in serum-free basal medium for 24 hr. After 5-20 minutes treatment with EGF (60 ng/ml) or 50 ul of the supernatant produced in Example 30, the medium was removed and 100 ml of extraction buffer ((20 mM HEPES pH 7.5, 0.15 M NaCl, 1% Triton X-100, 0.1% SDS, 2 mM Na3VO4, 2 mM Na4P2O7 and a cocktail of protease inhibitors (#1836170) obtained from Boeheringer Mannheim (Indianapolis, Ind.)) is added to each well and the plate is shaken on a rotating shaker for 5 minutes at 4° C. The plate is then placed in a vacuum transfer manifold and the extract filtered through the 0.45 mm membrane bottoms of each well using house vacuum. Extracts are collected in a 96-well catch/assay plate in the bottom of the vacuum manifold and immediately placed on ice. To obtain extracts clarified by centrifugation, the content of each well, after detergent solubilization for 5 minutes, is removed and centrifuged for 15 minutes at 4 degree C. at 16,000×g.

[1233] Test the filtered extracts for levels of tyrosine kinase activity. Although many methods of detecting tyrosine kinase activity are known, one method is described here.

[1234] Generally, the tyrosine kinase activity of a supernatant is evaluated by determining its ability to phosphorylate a tyrosine residue on a specific substrate (a biotinylated peptide). Biotinylated peptides that can be used for this purpose include PSKI (corresponding to amino acids 6-20 of the cell division kinase cdc2-p34) and PSK2 (corresponding to amino acids 1-17 of gastrin). Both peptides are substrates for a range of tyrosine kinases and are available from Boehringer Mannheim.

[1235] The tyrosine kinase reaction is set up by adding the following components in order. First, add 10 ul of 5 uM Biotinylated Peptide, then 10 ul ATP/Mg₂+(5 mM ATP/50 mM MgCl₂), then 10 ul of 5×Assay Buffer (40 mM imidazole hydrochloride, pH 7.3, 40 mM beta-glycerophosphate, 1 mM EGTA, 100 mM MgCl₂, 5 mM MnCl₂, 0.5 mg/ml BSA), then 5 ul of Sodium Vanadate(1 mM), and then 5 ul of water. Mix the components gently and preincubate the reaction mix at 30 degree C. for 2 min. Initial the reaction by adding 10 ul of the control enzyme or the filtered supernatant.

[1236] The tyrosine kinase assay reaction is then terminated by adding 10 ul of 120 mm EDTA and place the reactions on ice.

[1237] Tyrosine kinase activity is determined by transferring 50 ul aliquot of reaction mixture to a microtiter plate (MTP) module and incubating at 37 degree C. for 20 min. This allows the streptavidin coated 96 well plate to associate with the biotinylated peptide. Wash the MTP module with 300 ul/well of PBS four times. Next add 75 ul of anti-phospolyrosine antibody conjugated to horse radish peroxidase(anti-P-Tyr-POD(0.5u/ml)) to each well and incubate at 37 degree C. for one hour. Wash the well as above.

[1238] Next add 100 ul of peroxidase substrate solution (Boehringer Mannheim) and incubate at room temperature for at least 5 mins (up to 30 min). Measure the absorbance of the sample at 405 nm by using ELISA reader. The level of bound peroxidase activity is quantitated using an ELISA reader and reflects the level of tyrosine kinase activity.

### Example 39

### High-Throughput Screening Assay Identifying Phosphorylation Activity

[1239] As a potential alternative and/or complement to the assay of protein tyrosine kinase activity described in Example 38, an assay which detects activation (phosphorylation) of major intracellular signal transduction intermediates can also be used. For example, as described below one particular assay can detect tyrosine phosphorylation of the Erk-1 and Erk-2 kinases. However, phosphorylation of other molecules, such as Raf, JNK, p38 MAP, Map kinase kinase (MEK), MEK kinase, Src, Muscle specific kinase (MuSK), IRAK, Tec, and Janus, as well as any other phosphoserine, phosphotyrosine, or phosphothreonine molecule, can be detected by substituting these molecules for Erk-1 or Erk-2 in the following assay.

[1240] Specifically, assay plates are made by coating the wells of a 96-well ELISA plate with 0.1 ml of protein G (lug/ml) for 2 hr at room temp, (RT). The plates are then rinsed with PBS and blocked with 3% BSA/PBS for 1 hr at RT. The protein G plates are then treated with 2 commercial monoclonal antibodies (100 ng/well) against Erk-1 and Erk-2 (1 hr at RT) (Santa Cruz Biotechnology). (To detect other molecules, this step can easily be modified by substituting a monoclonal antibody detecting any of the above described molecules.) After 3-5 rinses with PBS, the plates are stored at 4 degree C. until use.

[1241] A431 cells are seeded at 20,000/well in a 96-well Loprodyne filterplate and cultured overnight in growth medium. The cells are then starved for 48 hr in basal medium (DMEM) and then treated with EGF (6 ng/well) or 50 ul of the supernatants obtained in Example 30 for 5-20 minutes. The cells are then solubilized and extracts filtered directly into the assay plate.

[1242] After incubation with the extract for 1 hr at RT, the wells are again rinsed. As a positive control, a commercial preparation of MAP kinase (10 ng/well) is used in place of A431 extract. Plates are then treated with a commercial polyclonal (rabbit) antibody (lug/ml) which specifically recognizes the phosphorylated epitope of the Erk-1 and Erk-2 kinases (1 hr at RT). This antibody is biotinylated by standard procedures. The bound polyclonal antibody is then quantitated by successive incubations with Europium-streptavidin and Europium fluorescence enhancing reagent in the Wallac DELFIA instrument (time-resolved fluorescence). An increased fluorescent signal over background indicates a phosphorylation by polypeptide of the present invention or a molecule induced by polypeptide of the present invention.

### Example 40

### Assay for the Stimulation of Bone Marrow CD34+ Cell Proliferation

[1243] This assay is based on the ability of human CD34+ to proliferate in the presence of hematopoictic growth factors and evaluates the ability of isolated polypeptides expressed in mammalian cells to stimulate proliferation of CD34+ cells.

[1244] It has been previously shown that most mature precursors will respond to only a single signal. More immature precursors require at least two signals to respond. Therefore, to test the effect of polypeptides on hematopoietic activity of a wide range of progenitor cells, the assay contains a given polypeptide in the presence or absence of other hematopoietic growth factors. Isolated cells are cultured for 5 days in the presence of Stem Cell Factor (SCF) in combination with tested sample. SCF alone has a very limited effect on the proliferation of bone marrow (BM) cells, acting in such conditions only as a “survival” factor. However, combined with any factor exhibiting stimulatory effect on these cells (e.g., IL-3), SCF will cause a synergistic effect. Therefore, if the tested polypeptide has a stimulatory effect on hematopoietic progenitors, such activity can be easily detected. Since normal BM cells have a low level of cycling cells, it is likely that any inhibitory effect of a given polypeptide, or agonists or antagonists thereof, might not be detected. Accordingly, assays for an inhibitory effect on progenitors is preferably tested in cells that are first subjected to in vitro stimulation with SCF+IL+3, and then contacted with the compound that is being evaluated for inhibition of such induced proliferation.

[1245] Briefly, CD34+ cells are isolated using methods known in the art. The cells are thawed and resuspended in medium (QBSF 60 serum-free medium with 1% L-glutamine (500 ml) Quality Biological, Inc., Gaithersburg, Md. Cat# 160-204-101). After several gentle centrifugation steps at 200×g, cells are allowed to rest for one hour. The cell count is adjusted to 2.5×10⁵ cells/ml. During this time, 100 μl of sterile water is added to the peripheral wells of a 96-well plate. The cytokines that can be tested with a given polypeptide in this assay is rhSCF (R&D Systems, Minneapolis, Minn., Cat# 255-SC) at 50 ng/ml alone and in combination with rhSCF and rhIL-3 (R&D Systems, Minneapolis, Minn., Cat# 203-ML) at 30 ng/ml. After one hour, 10 μl of prepared cytokines, 50 μl of the supernatants prepared in Example 30 (supernatants at 1:2 dilution=50 μl) and 20 μl of diluted cells are added to the media which is already present in the wells to allow for a final total volume of 100 μl. The plates are then placed in a 37° C./5% CO₂ incubator for five days.

[1246] Eighteen hours before the assay is harvested, 0.5 μCi/well of [3H] Thymidine is added in a 10 μl volume to each well to determine the proliferation rate. The experiment is terminated by harvesting the cells from each 96-well plate to a filtermat using the Tomtec Harvester 96. After harvesting, the filtermats are dried, trimmed and placed into OmniFilter assemblies consisting of one OmniFilter plate and one OmniFilter Tray. 60 μl Microscint is added to each well and the plate sealed with TopSeal-A press-on sealing film A bar code 15 sticker is affixed to the first plate for counting. The sealed plates are then loaded and the level of radioactivity determined via the Packard Top Count and the printed data collected for analysis. The level of radioactivity reflects the amount of cell proliferation.

[1247] The studies described in this example test the activity of a given polypeptide to stimulate bone marrow CD34+ cell proliferation. One skilled in the art could easily modify the exemplified studies to test the activity of polynucleotides (e.g., gene therapy), antibodies, agonists, and/or antagonists and fragments and variants thereof. As a nonlimiting example, potential antagonists tested in this assay would be expected to inhibit cell proliferation in the presence of cytokines and/or to increase the inhibition of cell proliferation in the presence of cytokines and a given polypeptide. In contrast, potential agonists tested in this assay would be expected to enhance cell proliferation and/or to decrease the inhibition of cell proliferation in the presence of cytokines and a given polypeptide.

[1248] The ability of a gene to stimulate the proliferation of bone marrow CD34+ cells indicates that polynucleotides and polypeptides corresponding to the gene are useful for the diagnosis and treatment of disorders affecting the immune system and hematopoiesis. Representative uses are described in the “Immune Activity” and “Infectious Disease” sections above, and elsewhere herein.

### Example 41

### Assay for Extracellular Matrix Enhanced Cell Response (EMECR)

[1249] The objective of the Extracellular Matrix Enhanced Cell Response (EMECR) assay is to identify gene products (e.g., isolated polypeptides) that act on the hematopoietic stem cells in the context of the extracellular matrix (ECM) induced signal.

[1250] Cells respond to the regulatory factors in the context of signal(s) received from the surrounding microenvironment. For example, fibroblasts, and endothelial and epithelial stem cells fail to replicate in the absence of signals from the ECM. Hematopoietic stem cells can undergo self-renewal in the bone marrow, but not in in vitro suspension culture. The ability of stem cells to undergo self-renewal in vitro is dependent upon their interaction with the stromal cells and the ECM protein fibronectin (fn). Adhesion of cells to fn is mediated by the α₅.β₁ and α₄.β₁ integrin receptors, which are expressed by human and mouse hematopoietic stem cells. The factor(s) which integrate with the ECM environment and are responsible for stimulating stem cell self-renewal havea not yet been identified. Discovery of such factors should be of great interest in gene therapy and bone marrow transplant applications

[1251] Briefly, polystyrene, non tissue culture treated, 96-well plates are coated with fn fragment at a coating concentration of 0.2 μg/cm². Mouse bone marrow cells are plated (1,000 cells/well) in 0.2 ml of serum-free medium. Cells cultured in the presence of IL-3 (5 ng/ml)+SCF (50 ng/ml) would serve as the positive control, conditions under which little self-renewal but pronounced differentiation of the stem cells is to be expected. Gene products of the invention (e.g., including, but not limited to, polynucleotides and polypeptides of the present invention, and supernatants produced in Example 30), are tested with appropriate negative controls in the presence and absence of SCF(5.0 ng/ml), where test factor supernatants represent 10% of the total assay volume. The plated cells are then allowed to grow by incubating in a low oxygen environment (5% CO₂, 7% O₂, and 88% N₂) tissue culture incubator for 7 days. The number of proliferating cells within the wells is then quantitated by measuring thymidine incorporation into cellular DNA. Verification of the positive hits in the assay will require phenotypic characterization of the cells, which can be accomplished by scaling up of the culture system and using appropriate antibody reagents against cell surface antigens and FACScan.

[1252] One skilled in the art could easily modify the exemplified studies to test the activity of polynucleotides (e.g., gene therapy), antibodies, agonists, and/or antagonists and fragments and variants thereof.

[1253] If a particular polypeptide of the present invention is found to be a stimulator of hematopoietic progenitors, polynucleotides and polypeptides corresponding to the gene encoding said polypeptide may be useful for the diagnosis and treatment of disorders affecting the immune system and hematopoiesis. Representative uses are described in the “Immune Activity” and “Infectious Disease” sections above, and elsewhere herein. The gene product may also be useful in the expansion of stem cells and committed progenitors of various blood lineages, and in the differentiation and/or proliferation of various cell types.

[1254] Additionally, the polynucleotides and/or polypeptides of the gene of interest and/or agonists and/or antagonists thereof, may also be employed to inhibit the proliferation and differentiation of hematopoietic cells and therefore may be employed to protect bone marrow stem cells from chemotherapeutic agents during chemotherapy. This antiproliferative effect may allow administration of higher doses of chemotherapeutic agents and, therefore, more effective chemotherapeutic treatment.

[1255] Moreover, polynucleotides and polypeptides corresponding to the gene of interest may also be useful for the treatment and diagnosis of hematopoietic related disorders such as, for example, anemia, pancytopenia, leukopenia, thrombocytopenia or leukemia since stromal cells are important in the production of cells of hematopoietic lineages. The uses include bone marrow cell ex-vivo culture, bone marrow transplantation, bone marrow reconstitution, radiotherapy or chemotherapy of neoplasia.

### Example 42

### Human Dermal Fibroblast and Aortic Smooth Muscle Cell Proliferation

[1256] The polypeptide of interest is added to cultures of normal human dermal fibroblasts (NHDF) and human aortic smooth muscle cells (AoSMC) and two co-assays are performed with each sample. The first assay examines the effect of the polypeptide of interest on the proliferation of normal human dermal fibroblasts (NHDF) or aortic smooth muscle cells (AoSMC). Aberrant growth of fibroblasts or smooth muscle cells is a part of several pathological processes, including fibrosis, and restenosis. The second assay examines IL6 production by both NHDF and SMC. IL6 production is an indication of functional activation. Activated cells will have increased production of a number of cytokines and other factors, which can result in a proinflammatory or immunomodulatory outcome. Assays are run with and without co-TNFa stimulation, in order to check for costimulatory or inhibitory activity.

[1257] Briefly, on day 1, 96-well black plates are set up with 1000 cells/well (NHDF) or 2000 cells/well (AoSMC) in 100 μl culture media. NHDF culture media contains: Clonetics FB basal media, 1 mg/ml hFGF, 5 mg/ml insulin, 50 mg/ml gentamycin, 2%FBS, while AoSMC culture media contains Clonetics SM basal media, 0.5 μg/ml hEGF, 5 mg/ml insulin, 1 μg/ml hFGF, 50 mg/ml gentamycin, 50 μg/ml Amphotericin B, 5%FBS. After incubation at 37° C. for at least 4-5 hours culture media is aspirated and replaced with growth arrest media. Growth arrest media for NHDF contains fibroblast basal media, 50 mg/ml gentamycin, 2% FBS, while growth arrest media for AoSMC contains SM basal media, 50 mg/ml gentamycin, 50 μg/ml Amphotericin B, 0.4% FBS. Incubate at 37° C. until day 2.

[1258] On day 2, serial dilutions and templates of the polypeptide of interest are designed such that they always include media controls and known-protein controls. For both stimulation and inhibition experiments, proteins are diluted in growth arrest media. For inhibition experiments, TNFa is added to a final concentration of 2 ng/ml (NHDF) or 5 ng/ml (AoSMC). Add ⅓ vol media containing controls or polypeptides of the present invention and incubate at 37 degrees C./5% CO₂ until day 5.

[1259] Transfer 60 μl from each well to another labeled 96-well plate, cover with a plate-sealer, and store at 4 degrees C. until Day 6 (for IL6 ELISA). To the remaining 100 μl in the cell culture plate, aseptically add Alamar Blue in an amount equal to 10% of the culture volume (10 μl). Return plates to incubator for 3 to 4 hours. Then measure fluorescence with excitation at 530 nm and emission at 590 nm using the CytoFluor. This yields the growth stimulation/inhibition data.

[1260] On day 5, the IL6 ELISA is performed by coating a 96 well plate with 50-100 ul/well of Anti-Human IL6 Monoclonal antibody diluted in PBS, pH 7.4, incubate ON at room temperature.

[1261] On day 6, empty the plates into the sink and blot on paper towels. Prepare Assay Buffer containing PBS with 4% BSA. Block the plates with 200 μl/well of Pierce Super Block blocking buffer in PBS for 1-2 hr and then wash plates with wash buffer (PBS, 0.05% Tween-20). Blot plates on paper towels. Then add 50 μl/well of diluted Anti-Human IL-6 Monoclonal, Biotin-labeled antibody at 0.50 mg/ml. Make dilutions of IL-6 stock in media (30, 10, 3, 1, 0.3, 0 ng/ml). Add duplicate samples to top row of plate. Cover the plates and incubate for 2 hours at RT on shaker.

[1262] Plates are washed with wash buffer and blotted on paper towels. Dilute EU-labeled Streptavidin 1:1000 in Assay buffer, and add 100 μl/well. Cover the plate and incubate 1 h at RT. Plates are again washed with wash buffer and blotted on paper towels.

[1263] Add 100 μl/well of Enhancement Solution. Shake for 5 minutes. Read the plate on the Wallac DELFIA Fluorometer. Readings from triplicate samples in each assay were tabulated and averaged.

[1264] A positive result in this assay suggests AoSMC cell proliferation and that the polypeptide of the present invention may be involved in dermal fibroblast proliferation and/or smooth muscle cell proliferation. A positive result also suggests many potential uses of polypeptides, polynucleotides, agonists and/or antagonists of the polynucleotide/polypeptide of the present invention which gives a positive result. For example, inflammation and immune responses, wound healing, and angiogenesis, as detailed throughout this specification. Particularly, polypeptides of the present invention and polynucleotides of the present invention may be used in wound healing and dermal regeneration, as well as the promotion of vasculogenesis, both of the blood vessels and lymphatics. The growth of vessels can be used in the treatment of, for example, cardiovascular diseases. Additionally, antagonists of polypeptides and polynucleotides of the invention may be useful in treating diseases, disorders, and/or conditions which involve angiogenesis by acting as an anti-vascular agent (e.g., anti-angiogenesis). These diseases, disorders, and/or conditions are known in the art and/or are described herein, such as, for example, malignancies, solid tumors, benign tumors, for example hemangiomas, acoustic neuromas, neurofibromas, trachomas, and pyogenic granulomas; artheroscleric plaques; ocular angiogenic diseases, for example, diabetic retinopathy, retinopathy of prematurity, macular degeneration, corneal graft rejection, neovascular glaucoma, retrolental fibroplasia, rubeosis, retinoblastoma, uvietis and Pterygia (abnormal blood vessel growth) of the eye; rheumatoid arthritis; psoriasis; delayed wound healing; endometriosis; vasculogenesis; granulations; hypertrophic scars (keloids); nonunion fractures; scleroderma; trachoma; vascular adhesions; myocardial angiogenesis; coronary collaterals; cerebral collaterals; arterioyenous malformations; ischemic limb angiogenesis; Osler-Webber Syndrome; plaque neovascularization; telangiectasia; hemophiliac joints; angiofibroma; fibromuscular dysplasia; wound granulation; Crohn's disease; and atherosclerosis. Moreover; antagonists of polypeptides and polynucleotides of the invention may be useful in treating anti-hyperproliferative diseases and/or anti-inflammatory known in the art and/or described herein.

[1265] One skilled in the art could easily modify the exemplified studies to test the activity of polynucleotides (e.g., gene therapy), antibodies, agonists, and/or antagonists and fragments and variants thereof.

### Example 43

### Cellular Adhesion Molecule (CAM) Expression on Endothelial Cells

[1266] The recruitment of lymphocytes to areas of inflammation and angiogenesis involves specific receptor-ligand interactions between cell surface adhesion molecules (CAMs) on lymphocytes and the vascular endothelium. The adhesion process, in both normal and pathological settings, follows a multi-step cascade that involves intercellular adhesion molecule-1 (ICAM-1), vascular cell adhesion molecule-1 (VCAM-1), and endothelial leukocyte adhesion molecule-1 (E-selectin) expression on endothelial cells (EC). The expression of these molecules and others on the vascular endothelium determines the efficiency with which leukocytes may adhere to the local vasculature and extravasate into the local tissue during the development of an inflammatory response. The local concentration of cytokines and growth factor participate in the modulation of the expression of these CAMs.

[1267] Briefly, endothelial cells (e.g., Human Umbilical Vein Endothelial cells (HUVECs)) are grown in a standard 96 well plate to confluence, growth medium is removed from the cells and replaced with 100 μl of 199 Medium (10% fetal bovine serum (FBS)). Samples for testing and positive or negative controls are added to the plate in triplicate (in 10 μl volumes). Plates are then incubated at 37° C. for either 5 h (selectin and integrin expression) or 24 h (integrin expression only). Plates are aspirated to remove medium and 100 μl of 0.1% paraformaldehyde-PBS(with Ca++ and Mg++) is added to each well. Plates are held at 4° C. for 30 min. Fixative is removed from the wells and wells are washed 1× with PBS(+Ca,Mg)+0.5% BSA and drained. 10 μl of diluted primary antibody is added to the test and control wells. Anti-ICAM-1-Biotin, Anti-VCAM-1-Biotin and Anti-E-selectin-Biotin are used at a concentration of 10 μg/ml (1:10 dilution of 0.1 mg/ml stock antibody). Cells are incubated at 37° C. for 30 min. in a humidified environment. Wells are washed three times with PBS(+Ca,Mg)+0.5% BSA. 20 μl of diluted ExtrAvidin-Alkaline Phosphatase (1:5,000 dilution, referred to herein as the working dilution) are added to each well and incubated at 37° C. for 30 min. Wells are washed three times with PBS(+Ca,Mg)+0.5% BSA. Dissolve 1 tablet of p-Nitrophenol Phosphate pNPP per 5 ml of glycine buffer (pH 10.4). 100 μl of pNPP substrate in glycine buffer is added to each test well. Standard wells in triplicate are prepared from the working dilution of the ExtrAvidin-Alkaline Phosphotase in glycine buffer: 1:5,000 (10⁰)>10^{-0 5}>10⁻¹>10^{-1 5}0.5 μl of each dilution is added to triplicate wells and the resulting AP content in each well is 5.50 ng, 1.74 ng, 0.55 ng, 0.18 ng. 100 μl of pNNP reagent is then added to each of the standard wells. The plate is incubated at 37° C. for 4 h. A volume of 50 μl of 3M NaOH is added to all wells. The plate is read on a plate reader at 405 nm using the background subtraction option on blank wells filled with glycine buffer only. Additionally, the template is set up to indicate the concentration of AP-conjugate in each standard well [5.50 ng; 1.74 ng; 0.55 ng; 0.18 ng]. Results are indicated as amount of bound AP-conjugate in each sample.

### Example 44

### Alamar Blue Endothelial Cells Proliferation Assay

[1268] This assay may be used to quantitatively determine protein mediated inhibition of bFGF-induced proliferation of Bovine Lymphatic Endothelial Cells (LECs), Bovine Aortic Endothelial Cells (BAECs) or Human Microvascular Uterine Myometrial Cells (UTMECs). This assay incorporates a fluorometric growth indicator based on detection of metabolic activity. A standard Alamar Blue Proliferation Assay is prepared in EGM-2MV with 10 ng/ml of bFGF added as a source of endothelial cell stimulation. This assay may be used with a variety of endothelial cells with slight changes in growth medium and cell concentration. Dilutions of the protein batches to be tested are diluted as appropriate. Serum-free medium (GIBCO SFM) without bFGF is used as a non-stimulated control and Angiostatin or TSP-1 are included as a known inhibitory controls.

[1269] Briefly, LEC, BAECs or UTMECs are seeded in growth media at a density of 5000 to 2000 cells/well in a 96 well plate and placed at 37 degreesC overnight. After the overnight incubation of the cells, the growth media is removed and replaced with GIBCO EC-SFM. The cells are treated with the appropriate dilutions of the protein of interest or control protein sample(s) (prepared in SFM) in triplicate wells with additional bFGF to a concentration of 10 ng/ml. Once the cells have been treated with the samples, the plate(s) is/are placed back in the 37° C. incubator for three days. After three days 10 ml of stock alamar blue (Biosource Cat# DALl 100) is added to each well and the plate(s) is/are placed back in the 37° C. incubator for four hours. The plate(s) are then read at 530 nm excitation and 590 nm emission using the CytoFluor fluorescence reader. Direct output is recorded in relative fluorescence units.

[1270] Alamar blue is an oxidation-reduction indicator that both fluoresces and changes color in response to chemical reduction of growth medium resulting from cell growth. As cells grow in culture, innate metabolic activity results in a chemical reduction of the immediate surrounding environment. Reduction related to growth causes the indicator to change from oxidized (non-fluorescent blue) form to reduced (fluorescent red) form (i.e., stimulated proliferation will produce a stronger signal and inhibited proliferation will produce a weaker signal and the total signal is proportional to the total number of cells as well as their metabolic activity). The background level of activity is observed with the starvation medium alone. This is compared to the output observed from the positive control samples (bFGF in growth medium) and protein dilutions.

### Example 45

### Detection of Inhibition of a Mixed Lymphocyte Reaction

[1271] This assay can be used to detect and evaluate inhibition of a Mixed Lymphocyte Reaction (MLR) by gene products (e.g., isolated polypeptides). Inhibition of a MLR may be due to a direct effect on cell proliferation and viability, modulation of costimulatory molecules on interacting cells, modulation of adhesiveness between lymphocytes and accessory cells, or modulation of cytokine production by accessory cells. Multiple cells may be targeted by these polypeptides since the peripheral blood mononuclear fraction used in this assay includes T, B and natural killer lymphocytes, as well as monocytes and dendritic cells.

[1272] Polypeptides of interest found to inhibit the MLR may find application in diseases associated with lymphocyte and monocyte activation or proliferation. These include, but are not limited to, diseases such as asthma, arthritis, diabetes, inflammatory skin conditions, psoriasis, eczema, systemic lupus erythematosus, multiple sclerosis, glomerulonephritis, inflammatory bowel disease, crohn's disease, ulcerative colitis, arteriosclerosis, cirrhosis, graft vs. host disease, host vs. graft disease, hepatitis, leukemia and lymphoma.

[1273] Briefly, PBMCs from human donors are purified by density gradient centrifugation using Lymphocyte Separation Medium (LSM®, density 1.0770 g/ml, Organon Teknika Corporation, West Chester, Pa.). PBMCs from two donors are adjusted to 2×10⁶ cells/ml in RPMI-1640 (Life Technologies, Grand Island, N.Y.) supplemented with 10% FCS and 2 mM glutamine. PBMCs from a third donor is adjusted to 2×10⁵ cells/ml. Fifty microliters of PBMCs from each donor is added to wells of a 96-well round bottom microtiter plate. Dilutions of test materials (50 μl) is added in triplicate to microtiter wells. Test samples (of the protein of interest) are added for final dilution of 1:4; rhuIL-2 (R&D Systems, Minneapolis, Minn., catalog number 202-IL) is added to a final concentration of 1 μg/ml; anti-CD4 mAb (R&D Systems, clone 34930.11, catalog number MAB379) is added to a final concentration of 10 μg/ml. Cells are cultured for 7-8 days at 37° C. in 5% CO₂, and 1 μC of [3H] thymidine is added to wells for the last 16 hrs of culture. Cells are harvested and thymidine incorporation determined using a Packard TopCount. Data is expressed as the mean and standard deviation of triplicate determinations.

[1274] Samples of the protein of interest are screened in separate experiments and compared to the negative control treatment, anti-CD4 mAb, which inhibits proliferation of lymphocytes and the positive control treatment, IL-2 (either as recombinant material or supernatant), which enhances proliferation of lymphocytes.

[1275] One skilled in the art could easily modify the exemplified studies to test the activity of polynucleotides (e.g., gene therapy), antibodies, agonists, and/or antagonists and fragments and variants thereof.

### Example 46

### Assays for Protease Activity

[1276] The following assay may be used to assess protease activity of the polypeptides of the invention.

[1277] Gelatin and casein zymography are performed essentially as described (Heusen et al., Anal. Biochem., 102:196-202 (1980); Wilson et al., Journal of Urology, 149:653-658 (1993)). Samples are run on 10% polyacryamide/0.1% SDS gels containing 1% gelain orcasein, soaked in 2.5% triton at room temperature for 1 hour, and in 0.1M glycine, pH 8.3 at 37° C. 5 to 16 hours. After staining in amido black areas of proteolysis apear as clear areas agains the blue-black background. Trypsin (Sigma T8642) is used as a positive control.

[1278] Protease activity is also determined by monitoring the cleavage of n-a-benzoyl-L-arginine ethyl ester (BAEE) (Sigma B-4500. Reactions are set up in (25 mMNaPO₄, 1 mM EDTA, and 1 mM BAEE), pH 7.5. Samples are added and the change in adsorbance at 260 nm is monitored on the Beckman DU-6 spectrophotometer in the time-drive mode. Trypsin is used as a positive control.

[1279] Additional assays based upon the release of acid-soluble peptides from casein or hemoglobin measured as adsorbance at 280 nm or calorimetrically using the Folin method are performed as described in Bergmeyer, et al., Methods of Enzymatic Analysis, 5 (1984). Other assays involve the solubilization of chromogenic substrates (Ward, Applied Science, 251-317 (1983)).

### Example 47

### Identifying Serine Protease Substrate Specificity

[1280] Methods known in the art or described herein may be used to determine the substrate specificity of the polypeptides of the present invention having serine protease activity. A preferred method of determining substrate specificity is by the use of positional scanning synthetic combinatorial libraries as described in GB 2 324 529 (incorporated herein in its entirety).

### Example 48

### Ligand Binding Assays

[1281] The following assay may be used to assess ligand binding activity of the polypeptides of the invention.

[1282] Ligand binding assays provide a direct method for ascertaining receptor pharmacology and are adaptable to a high throughput format. The purified ligand for a polypeptide is radiolabeled to high specific activity (50-2000 Ci/mmol) for binding studies. A determination is then made that the process of radiolabeling does not diminish the activity of the ligand towards its polypeptide. Assay conditions for buffers, ions, pH and other modulators such as nucleotides are optimized to establish a workable signal to noise ratio for both membrane and whole cell polypeptide sources. For these assays, specific polypeptide binding is defined as total associated radioactivity minus the radioactivity measured in the presence of an excess of unlabeled competing ligand. Where possible, more than one competing ligand is used to define residual nonspecific binding.

### Example 49

### Functional Assay in Xenopus Oocytes

[1283] Capped RNA transcripts from linearized plasmid templates encoding the polypeptides of the invention are synthesized in vitro with RNA polymerases in accordance with standard procedures. In vitro transcripts are suspended in water at a final concentration of 0.2 mg/ml. Ovarian lobes are removed from adult female toads, Stage V defolliculated oocytes are obtained, and RNA transcripts (10 ng/oocytc) are injected in a 50 nl bolus using a microinjection apparatus. Two electrode voltage clamps are used to measure the currents from individual Xenopus oocytes in response polypeptides and polypeptide agonist exposure. Recordings are made in Ca2+ free Barth's medium at room temperature. The Xenopus system can be used to screen known ligands and tissue/cell extracts for activating ligands.

### Example 50

### Microphysiometric Assays

[1284] Activation of a wide variety of secondary messenger systems results in extrusion of small amounts of acid from a cell. The acid formed is largely as a result of the increased metabolic activity required to fuel the intracellular signaling process. The pH changes in the media surrounding the cell are very small but are detectable by the CYTOSENSOR microphysiometer (Molecular Devices Ltd., Menlo Park, Calif.). The CYTOSENSOR is thus capable of detecting the activation of polypeptide which is coupled to an energy utilizing intracellular signaling pathway.

### Example 51

### Extract/Cell Supernatant Screening

[1285] A large number of mammalian receptors exist for which there remains, as yet, no cognate activating ligand (agonist). Thus, active ligands for these receptors may not be included within the ligands banks as identified to date. Accordingly, the polypeptides of the invention can also be functionally screened (using calcium, cAMP, microphysiometer, oocyte electrophysiology, etc., functional screens) against tissue extracts to identify its natural ligands. Extracts that produce positive functional responses can be sequentially subfractionated until an activating ligand is isolated and identified.

### Example 52

### Calcium and cAMP Functional Assays

[1286] Seven transmembrane receptors which are expressed in HEK 293 cells have been shown to be coupled functionally to activation of PLC and calcium mobilization and/or cAMP stimulation or inhibition. Basal calcium levels in the HEK 293 cells in receptor-transfected or vector control cells were observed to be in the normal, 100 nM to 200 nM, range. HEK 293 cells expressing recombinant receptors are loaded with fura 2 and in a single day >150 selected ligands or tissue/cell extracts are evaluated for agonist induced calcium mobilization. Similarly, HEK 293 cells expressing recombinant receptors are evaluated for the stimulation or inhibition of cAMP production using standard cAMP quantitation assays. Agonists presenting a calcium transient or cAMP fluctuation are tested in vector control cells to determine if the response is unique to the transfected cells expressing receptor.

### Example 53

### A TP-Binding Assay

[1287] The following assay may be used to assess ATP-binding activity of polypeptides of the invention.

[1288] ATP-binding activity of the polypeptides of the invention may be detected using the ATP-binding assay described in U.S. Pat. No. 5,858,719, which is herein incorporated by reference in its entirety. Briefly, ATP-binding to polypeptides of the invention is measured via photoaffinity labeling with 8-azido-ATP in a competition assay. Reaction mixtures containing 1 mg/ml of the ABC transport protein of the present invention are incubated with varying concentrations of ATP, or the non-hydrolyzable ATP analog adenyl-5′-imidodiphosphate for 10 minutes at 4° C. A mixture of 8-azido-ATP (Sigma Chem. Corp., St. Louis, Mo.) plus 8-azido-ATP (³²P-ATP) (5 mCi/μmol, ICN, Irvine Calif.) is added to a final concentration of 100 μM and 0.5 ml aliquots are placed in the wells of a porcelain spot plate on ice. The plate is irradiated using a short wave 254 nm UV lamp at a distance of 2.5 cm from the plate for two one-minute intervals with a one-minute cooling interval in between. The reaction is stopped by addition of dithiothreitol to a final concentration of 2 mM. The incubations are subjected to SDS-PAGE electrophoresis, dried, and autoradiographed. Protein bands corresponding to the particular polypeptides of the invention are excised, and the radioactivity quantified. A decrease in radioactivity with increasing ATP or adenly-5′-imidodiphosphate provides a measure of ATP affinity to the polypeptides.

### Example 54

### Small Molecule Screening

[1289] This invention is particularly useful for screening therapeutic compounds by using the polypeptides of the invention, or binding fragments thereof, in any of a variety of drug screening techniques. The polypeptide or fragment employed in such a test may be affixed to a solid support, expressed on a cell surface, free in solution, or located intracellularly. One method of drug screening utilizes eukaryotic or prokaryotic host cells which are stably transformed with recombinant nucleic acids expressing the polypeptide or fragment. Drugs are screened against such transformed cells in competitive binding assays. One may measure, for example, the formulation of complexes between the agent being tested and polypeptide of the invention.

[1290] Thus, the present invention provides methods of screening for drugs or any other agents which affect activities mediated by the polypeptides of the invention. These methods comprise contacting such an agent with a polypeptide of the invention or fragment thereof and assaying for the presence of a complex between the agent and the polypeptide or fragment thereof, by methods well known in the art. In such a competitive binding assay, the agents to screen are typically labeled. Following incubation, free agent is separated from that present in bound form, and the amount of free or uncomplexed label is a measure of the ability of a particular agent to bind to the polypeptides of the invention.

[1291] Another technique for drug screening provides high throughput screening for compounds having suitable binding affinity to the polypeptides of the invention, and is described in great detail in European Patent Application 84/03564, published on Sep. 13, 1984, which is herein incorporated by reference in its entirety. Briefly stated, large numbers of different small molecule test compounds are synthesized on a solid substrate, such as plastic pins or some other surface. The test compounds are reacted with polypeptides of the invention and washed. Bound polypeptides are then detected by methods well known in the art. Purified polypeptides are coated directly onto plates for use in the aforementioned drug screening techniques. In addition, non-neutralizing antibodies may be used to capture the peptide and immobilize it on the solid support.

[1292] This invention also contemplates the use of competitive drug screening assays in which neutralizing antibodies capable of binding polypeptides of the invention specifically compete with a test compound for binding to the polypeptides or fragments thereof. In this manner, the antibodies are used to detect the presence of any peptide which shares one or more antigenic epitopes with a polypeptide of the invention.

### Example 55

### Phosphorylation Assay

[1293] In order to assay for phosphorylation activity of the polypeptides of the invention, a phosphorylation assay as described in U.S. Pat. No. 5,958,405 (which is herein incorporated by reference) is utilized. Briefly, phosphorylation activity may be measured by phosphorylation of a protein substrate using gamma-labeled ³²P-ATP and quantitation of the incorporated radioactivity using a gamma radioisotope counter. The polypeptides of the invention are incubated with the protein substrate, ³²P-ATP, and a kinase buffer. The ³²P incorporated into the substrate is then separated from free ³²P-ATP by electrophoresis, and the incorporated ³²P is counted and compared to a negative control. Radioactivity counts above the negative control are indicative of phosphorylation activity of the polypeptides of the invention.

### Example 56

### Detection of Phosphorylation Activity (Activation) of the Polypeptides of the Invention in the Presence of Polypeptide Ligands

[1294] Methods known in the art or described herein may be used to determine the phosphorylation activity of the polypeptides of the invention. A preferred method of determining phosphorylation activity is by the use of the tyrosine phosphorylation assay as described in U.S. Pat. No. 5,817,471 (incorporated herein by reference).

### Example 57

### Identification of Signal Transduction Proteins that Interact With Polypeptides of the Present Invention

[1295] The purified polypeptides of the invention are research tools for the identification, characterization and purification of additional signal transduction pathway proteins or receptor proteins. Briefly, labeled polypeptides of the invention are useful as reagents for the purification of molecules with which it interacts. In one embodiment of affinity purification, polypeptides of the invention are covalently coupled to a chromatography column. Cell-free extract derived from putative target cells, such as carcinoma tissues, is passed over the column, and molecules with appropriate affinity bind to the polypeptides of the invention. The protein complex is recovered from the column, dissociated, and the recovered molecule subjected to N-terminal protein sequencing. This amino acid sequence is then used to identify the captured molecule or to design degenerate oligonucleotide probes for cloning the relevant gene from an appropriate cDNA library.

### Example 58

### IL-6 Bioassay

[1296] To test the proliferative effects of the polypeptides of the invention, the IL-6 Bioassay as described by Marz et al. is utilized (Proc. Natl. Acad. Sci., U.S.A., 95:3251-56 (1998), which is herein incorporated by reference). Briefly, IL-6 dependent B9 murine cells are washed three times in IL-6 free medium and plated at a concentration of 5,000 cells per well in 50 μl, and 50 μl of the IL-6-like polypeptide is added. After 68 hrs. at 37° C., the number of viable cells is measured by adding the tetrazolium salt thiazolyl blue (MTT) and incubating for a further 4 hrs. at 37° C. B9 cells are lysed by SDS and optical density is measured at 570 nm. Controls containing IL-6 (positive) and no cytokine (negative) are utilized. Enhanced proliferation in the test sample(s) relative to the negative control is indicative of proliferative effects mediated by polypeptides of the invention.

### Example 59

### Support of Chicken Embryo Neuron Survival

[1297] To test whether sympathetic neuronal cell viability is supported by polypeptides of the invention, the chicken embryo neuronal survival assay of Senaldi et al is utilized (Proc. Natl. Acad. Sci., U.S.A., 96:11458-63 (1998), which is herein incorporated by reference). Briefly, motor and sympathetic neurons are isolated from chicken embryos, resuspended in Ll5 medium (with 10% FCS, glucose, sodium selenite, progesterone, conalbumin, putrescine, and insulin; Life Technologies, Rockville, Md.) and Dulbecco's modified Eagles medium [with 10% FCS, glutamine, penicillin, and 25 mM Hepes buffer (pH 7.2); Life Technologies, Rockville, Md.], respectively, and incubated at 37° C. in 5% CO₂ in the presence of different concentrations of the purified IL-6-like polypeptide, as well as a negative control lacking any cytokine. After 3 days, neuron survival is determined by evaluation of cellular morphology, and through the use of the colorimetric assay of Mosmann (Mosmann, T., J. Imminol. Methods, 65:55-63 (1983)). Enhanced neuronal cell viability as compared to the controls lacking cytokine is indicative of the ability of the inventive purified IL-6-like polypeptide(s) to enhance the survival of neuronal cells.

### Example 60

### Assay for Phosphatase Activity

[1298] The following assay may be used to assess serine/threonine phosphatase (PTPase) activity of the polypeptides of the invention.

[1299] In order to assay for serine/threonine phosphatase (PTPase) activity, assays can be utilized which are widely known to those skilled in the art. For example, the serine/threonine phosphatase (PSPase) activity is measured using a PSPase assay kit from New England Biolabs, Inc. Myelin basic protein (MyBP), a substrate for PSPase, is phosphorylated on serine and threonine residues with cAMP-dependent Protein Kinase in the presence of [³²P]ATP. Protein serine/threonine phosphatase activity is then determined by measuring the release of inorganic phosphate from 32P-labeled MyBP.

### Example 61

### Interaction of Serine/Threonine Phosphatases with Other Proteins

[1300] The polypeptides of the invention with serine/threonine phosphatase activity as determined in Example 60 are research tools for the identification, characterization and purification of additional interacting proteins or receptor proteins, or other signal transduction pathway proteins. Briefly, labeled polypeptide(s) of the invention is useful as a reagent for the purification of molecules with which it interacts. In one embodiment of affinity purification, polypeptide of the invention is covalently coupled to a chromatography column. Cell-free extract derived from putative target cells, such as neural or liver cells, is passed over the column, and molecules with appropriate affinity bind to the polypeptides of the invention. The polypeptides of the invention complex is recovered from the column, dissociated, and the recovered molecule subjected to N-terminal protein sequencing. This amino acid sequence is then used to identify the captured molecule or to design degenerate oligonucleotide probes for cloning the relevant gene from an appropriate cDNA library.

### Example 62

### Assaying for Heparanase Activity

[1301] In order to assay for heparanase activity of the polypeptides of the invention, the heparanase assay described by Vlodavsky et at is utilized (Vlodavsky, I., et al., Nat. Med., 5:793-802 (1999)). Briefly, cell lysates, conditioned media or intact cells (1×10⁶ cells per 35-mm dish) are incubated for 18 hrs at 37° C., pH 6.2-6.6, with ³⁵S-labeled ECM or soluble ECM derived peak I proteoglycans. The incubation medium is centrifuged and the supernatant is analyzed by gel filtration on a Sepharose CL-6B column (0.9×30 cm). Fractions are eluted with PBS and their radioactivity is measured. Degradation fragments of heparan sulfate side chains are eluted from Sepharose 6B at 0.5<Kₐᵥ<0.8 (peak II). Each experiment is done at least three times. Degradation fragments corresponding to “peak II,” as described by Vlodavsky et al., is indicative of the activity of the polypeptides of the invention in cleaving heparan sulfate.

### Example 63

### Immobilization of Biomolecules

[1302] This example provides a method for the stabilization of polypeptides of the invention in non-host cell lipid bilayer constucts (see, e.g., Bieri et al., Nature Biotech 17:1105-1108 (1999), hereby incorporated by reference in its entirety herein) which can be adapted for the study of polypeptides of the invention in the various functional assays described above. Briefly, carbohydrate-specific chemistry for biotinylation is used to confine a biotin tag to the extracellular domain of the polypeptides of the invention, thus allowing uniform orientation upon immobilization. A 50 uM solution of polypeptides of the invention in washed membranes is incubated with 20 mM NaIO4 and 1.5 mg/ml (4 mM) BACH or 2 mg/ml (7.5 mM) biotin-hydrazide for 1 hr at room temperature (reaction volume, 150 ul). Then the sample is dialyzed (Pierce Slidealizer Cassett, 10 kDa cutoff; Pierce Chemical Co., Rockford Ill.) at 4C first for 5 h, exchanging the buffer after each hour, and finally for 12 h against 500 ml buffer R (0.15 M NaCl, 1 mM MgCl2, 10 mM sodium phosphate, pH 7). Just before addition into a cuvette, the sample is diluted 1:5 in buffer ROG50 (Buffer R supplemented with 50 mM octylglucoside).

### Example 64

### TAQMVAN

[1303] Quantitative PCR (QPCR). Total RNA from cells in culture are extracted by Trizol separation as recommended by the supplier (LifeTechnologies). (Total RNA is treated with DNase I (Life Technologies) to remove any contaminating genomic DNA before reverse transcription.) Total RNA (50 ng) is used in a one-step, 50 ul, RT-QPCR, consisting of Taqman Buffer A (Perkin-Elmer; 50 mM KCl/10 mM Tris, pH 8.3), 5.5 mM MgCl₂, 240 μM each dNTP, 0.4 units RNase inhibitor(Promega), 8%glycerol, 0.012% Tween-20, 0.05% gelatin, 0.3 uM primers, 0.1 uM probe, 0.025units Amplitaq Gold (Perkin-Elmer) and 2.5 units Superscript II reverse transcriptase (Life Technologies). As a control for genomic contamination, parallel reactions are setup without reverse transcriptase. The relative abundance of (unknown) and 18S RNAs are assessed by using the Applied Biosystems Prism 7700 Sequence Detection System (Livak, K. J., Flood, S. J., Marmaro, J., Giusti, W. & Deetz, K. (1995) PCR Methods Appl. 4, 357-362). Reactions are carried out at 48° C. for 30 min, 95° C. for 10 min, followed by 40 cycles of 95° C. for 15s, 60° C. for 1 min. Reactions are performed in triplicate.

[1304] Primers (f & r) and FRET probes sets are designed using Primer Express Software (Perkin-Elmer). Probes are labeled at the 5′-end with the reporter dye 6-FAM and on the 3′-end with the quencher dye TAMRA (Biosource International, Camarillo, Calif. or Perkin-Elmer).

### Example 65

### Assays for Metalloproteinase Activity

[1305] Metalloproteinases (EC 3.4.24.-) are peptide hydrolases which use metal ions, such as Zn²⁺, as the catalytic mechanism. Metalloproteinase activity of polypeptides of the present invention can be assayed according to the following methods.

[1306] Proteolysis of Alpha-2-macroglobulin

[1307] To confirm protease activity, purified polypeptides of the invention are mixed with the substrate alpha-2-macroglobulin (0.2 unit/ml; Boehringer Mannheim, Germany) in 1×assay buffer (50 mM HEPES, pH 7.5, 0.2 M NaCl, 10 mM CaCl₂, 25 μM ZnCl₂ and 0.05% Brij-35) and incubated at 37° C. for 1-5 days. Trypsin is used as positive control. Negative controls contain only alpha-2-macroglobulin in assay buffer. The samples are collected and boiled in SDS-PAGE sample buffer containing 5% 2-mercaptoethanol for 5-min, then loaded onto 8% SDS-polyacrylamide gel. After electrophoresis the proteins are visualized by silver staining. Proteolysis is evident by the appearance of lower molecular weight bands as compared to the negative control.

[1308] Inhibition of Alpha-2-Macroglobulin Proteolysis by Inhibitors of Metalloproteinases

[1309] Known metalloproteinase inhibitors (metal chelators (EDTA, EGTA, AND HgCl₂), peptide metalloproteinase inhibitors (TIMP-1 and TIMP-2), and commercial small molecule MMP inhibitors) are used to characterize the proteolytic activity of polypeptides of the invention. The three synthetic MMP inhibitors used are: MMP inhibitor I, [IC₅₀=1.0 μM against MMP-1 and MMP-8; IC₅₀=30 μM against MMP-9; IC₅₀=150 μM against MMP-3]; MMP-3 (stromelysin-1) inhibitor I [IC₅₀=5 μM against MMP-3], and MMP-3 inhibitor II [Kᵢ=130 nM against MMP-3]; inhibitors available through Calbiochem, catalog #444250, 444218, and 444225, respectively). Briefly, different concentrations of the small molecule MMP inhibitors are mixed with purified polypeptides of the invention (50 μg/ml) in 22.9 μl of 1×HEPES buffer (50 mM HEPES, pH 7.5, 0.2 M NaCl, 10 mM CaCl₂, 25 μM ZnCl₂ and 0.05% Brij-35) and incubated at room temperature (24° C.) for 2-hr, then 7.1 μl of substrate alpha-2-macroglobulin (0.2 unit/ml) is added and incubated at 37° C. for 20-hr. The reactions are stopped by adding 4×sample buffer and boiled immediately for 5 minutes. After SDS-PAGE, the protein bands are visualized by silver stain.

[1310] Synthetic Fluorogenic Peptide Substrates Cleavage Assay

[1311] The substrate specificity for polypeptides of the invention with demonstrated metalloproteinase activity can be determined using synthetic fluorogenic peptide substrates (purchased from BACHEM Bioscience Inc). Test substrates include, M-1985, M-2225, M-2105, M-2110, and M-2255. The first four are MMP substrates and the last one is a substrate of tumor necrosis factor-α (TNF-α) converting enzyme (TACE). All the substrates are prepared in 1:1 dimethyl sulfoxide (DMSO) and water. The stock solutions are 50-500 μM. Fluorescent assays are performed by using a Perkin Elmer LS 50B luminescence spectrometer equipped with a constant temperature water bath. The excitation λ is 328 nm and the emission k is 393 nm. Briefly, the assay is carried out by incubating 176 μl 1×HEPES buffer (0.2 M NaCl, 10 mM CaCl₂, 0.05% Brij-35 and 50 mM HEPES, pH 7.5) with 4 μl of substrate solution (50 μM) at 25° C. for 15 minutes, and then adding 20 μl of a purified polypeptide of the invention into the assay cuvett. The final concentration of substrate is 1 μM. Initial hydrolysis rates are monitored for 30-min.

### Example 66

### Characterization of the cDNA contained in a deposited plasmid

[1312] The size of the cDNA insert contained in a deposited plasmid may be routinely determined using techniques known in the art, such as PCR amplification using synthetic primers hybridizable to the 3′ and 5′ ends of the cDNA sequence. For example, two primers of 17-30 nucleotides derived from each end of the cDNA (i.e., hybridizable to the absolute 5′ nucleotide or the 3′ nucleotide end of the sequence of SEQ ID NO:X, respectively) are synthesized and used to amplify the cDNA using the deposited cDNA plasmid as a template. The polymerase chain reaction is carried out under routine conditions, for instance, in 25 ul of reaction mixture with 0.5 ug of the above cDNA template. A convenient reaction mixture is 1.5-5 mM MgCl₂, 0.01% (w/v) gelatin, 20 uM each of dATP, dCTP, dGTP, dTTP, 25 pmol of each primer and 0.25 Unit of Taq polymerase. Thirty five cycles of PCR (denaturation at 94 degree C. for 1 min; annealing at 55 degree C. for 1 min; elongation at 72 degree C. for 1 min) are performed with a Perkin-Elmer Cetus automated thermal cycler. The amplified product is analyzed by agarose gel electrophoresis. The PCR product is verified to be the selected sequence by subcloning and sequencing the DNA product.

[1313] Use of the above methodologies and/or other methodologies known in the art generates fragments from the clone corresponding to the approximate fragments described in Table 8, below. Accordingly, Table 8 provides a physical characterization of certain clones encompassed by the invention. The first column provides the unique clone identifier, “Clone ID NO:Z”, for cDNA clones of the invention, as described in Table 1A. The second column provides the approximate size of the cDNA insert contained in the corresponding cDNA clone.

TABLE 8

| | CDNA |
|---|---|
| Clone ID | Insert |
| NO: Z | Size: |
| HTSFJ40 | 1100 |
| HTADZ74 | 1300 |
| HELHB88 | 3300 |
| HOUHL51 | 800 |
| HE8TI39 | 2800 |
| HTELV86 | 1600 |
| HUJCT05 | 1700 |
| HBGMR22 | 800 |
| HKGDE58 | 1300 |
| HWLEY40 | 1500 |
| HMSGF27 | 1600 |
| HTTCT34 | 600 |
| HTEON29 | 500 |
| HHFGP83 | 2200 |
| HAPNZ77 | 1500 |
| HFCBB56 | 2100 |
| HMAMB94 | 2300 |
| HCYBK19 | 1900 |
| HWNCY05 | 1000 |
| HSDHB12 | 700 |
| HELDR74 | 1500 |
| HOEET48 | 1500 |
| HBODE51 | 2600 |
| HEQAY32 | 1100 |
| HSDGJ23 | 800 |
| HCEOR02 | 2100 |
| HRODF07 | 900 |

[1314] It will be clear that the invention may be practiced otherwise than as particularly described in the foregoing description and examples. Numerous modifications and variations of the present invention are possible in light of the above teachings and, therefore, are within the scope of the appended claims.

[1315] The entire disclosure of each document cited (including patents, patent applications, journal articles, abstracts, laboratory manuals, books, or other disclosures) in the Background of the Invention, Detailed Description, and Examples is hereby incorporated herein by reference. In addition, the CD-R copy of the sequence listing submitted herewith and the corresponding computer readable fortn are both incorporated herein by reference in their entireties. The specification and sequence listing of each of the following U.S. applications are herein incorporated by reference in their entirety: Application No. 60/179,065, filed on Jan. 31, 2000; Application No. 60/180,628, filed on Feb. 4, 2000; Application No. 60/214,886, filed on Jun. 28, 2000; Application No. 60/217,487, filed on Jul. 11, 2000; Application No. 60/225,758, filed on Aug. 14, 2000; Application No. 60/220,963, filed on Jul. 26, 2000; Application No. 60/217,496, filed on Jul. 11, 2000; Application No. 60/225,447, filed on Aug. 14, 2000; Application No. 60/218,290, filed on Jul. 14, 2000; Application No. 60/225,757, filed on Aug. 14, 2000; Application No. 60/226,868, filed on Aug. 22, 2000; Application No. 60/216,647, filed on Jul. 7, 2000; Application No. 60/225,267, filed on Aug. 14, 2000; Application No. 60/216,880, filed on Jul. 7, 2000; Application No. 60/225,270, filed on Aug. 14, 2000; Application No. 60/251,869, filed on Dec. 8, 2000; Application No. 60/235,834, filed on Sep. 27, 2000; Application No. 60/234,274, filed on Sep. 21, 2000; Application No. 60/234,223, filed on Sep. 21, 2000; Application No. 60/228,924, filed on Aug. 30, 2000; Application No. 60/224,518, filed on Aug. 14, 2000; Application No. 60/236,369, filed on Sep. 29, 2000; Application No. 60/224,519, filed on Aug. 14, 2000; Application No. 60/220,964, filed on Jul. 26, 2000; Application No. 60/241,809, filed on Oct. 20, 2000; Application No. 60/249,299, filed on Nov. 17, 2000; Application No. 60/236,327, filed on Sep. 29, 2000; Application No. 60/241,785, filed on Oct. 20, 2000; Application No. 60/244,617, filed on Nov. 1, 2000; Application No. 60/225,268, filed on Aug. 14, 2000; Application No. 60/236,368, filed on Sep. 29, 2000; Application No. 60/251,856, filed on Dec. 8, 2000; Application No. 60/251,868, filed on Dec. 8, 2000; Application No. 60/229,344, filed on Sep. 1, 2000; Application No. 60/234,997, filed on Sep. 25, 2000; Application No. 60/229,343, filed on Sep. 1, 2000; Application No. 60/229,345, filed on Sep. 1, 2000; Application No. 60/229,287, filed on Sep. , 2000; Application No. 60/229,513, filed on Sep. 5, 2000; Application No. 60/231,413, filed on Sep. 8, 2000; Application No. 60/229,509, filed on Sep. , 2000; Application No. 60/236,367, filed on Sep. 29, 2000; Application No. 60/237,039, filed on Oct. 2, 2000; Application No. 60/237,038, filed on Oct. 2, 2000; Application No. 60/236,370, filed on Sep. 29, 2000; Application No. 60/236,802, filed on Oct. 2, 2000; Application No. 60/237,037, filed on Oct. 2, 2000; Application No. 60/237,040, filed on Oct. 2, 2000; Application No. 60/240,960, filed on Oct. 20, 2000; Application No. 60/239,935, filed on Oct. 13, 2000; Application No. 60/239,937, filed on Oct. 13, 2000; Application No. 60/241,787, filed on Oct. 20, 2000; Application No. 60/246,474, filed on Nov. 8, 2000; Application No. 60/246,532, filed on Nov. 8, 2000; Application No. 60/249,216, filed on Nov. 17, 2000; Application No. 60/249,210, filed on Nov. 17, 2000; Application No. 60/226,681, filed on Aug. 22, 2000; Application No. 60/225,759, filed on Aug. 14, 2000; Application No. 60/225,213, filed on Aug. 14, 2000; Application No. 60/227,182, filed on Aug. 22, 2000; Application No. 60/225,214, filed on Aug. 14, 2000; Application No. 60/235,836, filed on Sep. 27, 2000; Application No. 60/230,438, filed on Sep. , 2000; Application No. 60/215,135, filed on Jun. 30, 2000; Application No. 60/225,266, filed on Aug. 14, 2000; Application No. 60/249,218, filed on Nov. 17, 2000; Application No. 60/249,208, filed on Nov. 17, 2000; Application No. 60/249,213, filed on Nov. 17, 2000; Application No. 60/249,212, filed on Nov. 17, 2000; Application No. 60/249,207, filed on Nov. 17, 2000; Application No. 60/249,245, filed on Nov. 17, 2000; Application No. 60/249,244, filed on Nov. 17, 2000; Application No. 60/249,217, filed on Nov. 17, 2000; Application No. 60/249,211, filed on Nov. 17, 2000; Application No. 60/249,215, filed on Nov. 17, 2000; Application No. 60/249,264, filed on Nov. 17, 2000; Application No. 60/249,214, filed on Nov. 17, 2000; Application No. 60/249,297, filed on Nov. 17, 2000; Application No. 60/232,400, filed on Sep. 14, 2000; Application No. 60/231,242, filed on Sep. 8, 2000; Application No. 60/232,081, filed on Sep. 8, 2000; Application No. 60/232,080, filed on Sep. 8, 2000; Application No. 60/231,414, filed on Sep. 8, 2000; Application No. 60/231,244, filed on Sep. 8, 2000; Application No. 60/233,064, filed on Sep. 14, 2000; Application No. 60/233,063, filed on Sep. 14, 2000; Application No. 60/232,397, filed on Sep. 14, 2000; Application No. 60/232,399, filed on Sep. 14, 2000; Application No. 60/232,401, filed on Sep. 14, 2000; Application No. 60/241,808, filed on Oct. 20, 2000; Application No. 60/241,826, filed on Oct. 20, 2000; Application No. 60/241,786, filed on Oct. 20, 2000; Application No. 60/241,221, filed on Oct. 20, 2000; Application No. 60/246,475, filed on Nov. 8, 2000; Application No. 60/231,243, filed on Sep. 8, 2000; Application No. 60/233,065, filed on Sep. 14, 2000; Application No. 60/232,398, filed on Sep. 14, 2000; Application No. 60/234,998, filed on Sep. 25, 2000; Application No. 60/246,477, filed on Nov. 8, 2000; Application No. 60/246,528, filed on Nov. 8, 2000; Application No. 60/246,525, filed on Nov. 8, 2000; Application No. 60/246,476, filed on 08-Nov-2000; Application No. 60/246,526, filed on Nov. 8, 2000; Application No. 60/249,209, filed on Nov. 17, 2000; Application No. 60/246,527, filed on Nov. 8, 2000; Application No. 60/246,523, filed on Nov. 8, 2000; Application No. 60/246,524, filed on Nov. 8, 2000; Application No. 60/246,478, filed on Nov. 8, 2000; Application No. 60/246,609, filed on Nov. 8, 2000; Application No. 60/246,613, filed on Nov. 8, 2000; Application No. 60/249,300, filed on Nov. 17, 2000; Application No. 60/249,265, filed on Nov. 17, 2000; Application No. 60/246,610, filed on Nov. 8, 2000; Application No. 60/246,611, filed on Nov. 8, 2000; Application No. 60/230,437, filed on Sep. , 2000; Application No. 60/251,990, filed on Dec. 8, 2000; Application No. 60/251,988, filed on Dec. 5, 2000; Application No. 60/251,030, filed on Dec. 5, 2000; Application No. 60/251,479, filed on Dec. 6, 2000; Application No. 60/256,719, filed on Dec. 5, 2000; Application No. 60/250,160, filed on Dec. 1, 2000; Application No. 60/251,989, filed on Dec. 8, 2000; Application No. 60/250,391, filed on Dec. 1, 2000; Application No. 60/254,097, filed on Dec. 11, 2000; and application Ser. No. 09/764,890, filed Jan. 17, 2001.

[1316] Moreover, the microfiche copy and the corresponding computer readable form of the Sequence Listing of U.S. Application Serial No. 60/179,065, and the hard copy of and the corresponding computer readable form of the Sequence Listing of U.S. Application Serial No. 60/180,628 are also incorporated herein by reference in their entireties.

What is claimed is:

1. An isolated nucleic acid molecule comprising a polynucleotide having a nucleotide sequence at least 95% identical to a sequence selected from the group consisting of:
(a) a polynucleotide fragment of SEQ ID NO:X or a polynucleotide fragment of the cDNA sequence contained in Clone ID NO:Z, which is hybridizable to SEQ ID NO:X;
(b) a polynucleotide encoding a polypeptide fragment of SEQ ID NO:Y or a polypeptide fragment encoded by the cDNA sequence contained in cDNA Clone ID NO:Z, which is hybridizable to SEQ ID NO:X;
(c) a polynucleotide encoding a polypeptide fragment of a polypeptide encoded by SEQ ID NO:X or a polypeptide fragment encoded by the cDNA sequence contained in cDNA Clone ID NO:Z, which is hybridizable to SEQ ID NO:X;
(d) a polynucleotide encoding a polypeptide domain of SEQ ID NO:Y or a polypeptide domain encoded by the cDNA sequence contained in cDNA Clone ID NO:Z, which is hybridizable to SEQ ID NO:X;
(e) a polynucleotide encoding a polypeptide epitope of SEQ ID NO:Y or a polypeptide epitope encoded by the cDNA sequence contained in cDNA Clone ID NO:Z, which is hybridizable to SEQ ID NO:X;
(f) a polynucleotide encoding a polypeptide of SEQ ID NO:Y or the cDNA sequence contained in cDNA Clone ID NO:Z, which is hybridizable to SEQ ID NO:X, having biological activity;
(g) a polynucleotide which is a variant of SEQ ID NO:X;
(h) a polynucleotide which is an allelic variant of SEQ ID NO:X;
(i) a polynucleotide which encodes a species homologue of the SEQ ID NO:Y;
(j) a polynucleotide capable of hybridizing under stringent conditions to any one of the polynucleotides specified in (a)-(i), wherein said polynucleotide does not hybridize under stringent conditions to a nucleic acid molecule having a nucleotide sequence of only A residues or of only T residues.

2. The isolated nucleic acid molecule of claim 1, wherein the polynucleotide fragment comprises a nucleotide sequence encoding a protein.

3. The isolated nucleic acid molecule of claim 1, wherein the polynucleotide fragment comprises a nucleotide sequence encoding the sequence identified as SEQ ID NO:Y or the polypeptide encoded by the cDNA sequence contained in cDNA Clone ID NO:Z, which is hybridizable to SEQ ID NO:X.

4. The isolated nucleic acid molecule of claim 1, wherein the polynucleotide fragment comprises the entire nucleotide sequence of SEQ ID NO:X or the cDNA sequence contained in cDNA Clone ID NO:Z, which is hybridizable to SEQ ID NO:X.

5. The isolated nucleic acid molecule of claim 2, wherein the nucleotide sequence comprises sequential nucleotide deletions from either the C-terminus or the N-terminus.

6. The isolated nucleic acid molecule of claim 3, wherein the nucleotide sequence comprises sequential nucleotide deletions from either the C-terminus or the N-terminus.

7. A recombinant vector comprising the isolated nucleic acid molecule of claim 1.

8. A method of making a recombinant host cell comprising the isolated nucleic acid molecule of claim 1.

9. A recombinant host cell produced by the method of claim 8.

10. The recombinant host cell of claim 9 comprising vector sequences.

11. An isolated polypeptide comprising an amino acid sequence at least 90% identical to a sequence selected from the group consisting of:
(a) a polypeptide fragment of SEQ ID NO:Y or the encoded sequence contained in cDNA Clone ID NO:Z;
(b) a polypeptide fragment of SEQ ID NO:Y or the encoded sequence contained in cDNA Clone ID NO:Z, having biological activity;
(c) a polypeptide domain of SEQ ID NO:Y or the encoded sequence contained in cDNA Clone ID NO:Z;
(d) a polypeptide epitope of SEQ ID NO:Y or the encoded sequence contained in cDNA Clone ID NO:Z;
(e) a full length protein of SEQ ID NO:Y or the encoded sequence contained in cDNA Clone ID NO:Z;
(f) a variant of SEQ ID NO:Y;
(g) an allelic variant of SEQ ID NO:Y; or (h) a species homologue of the SEQ ID NO:Y.

12. The isolated polypeptide of claim 11, wherein the full length protein comprises sequential amino acid deletions from either the C-terminus or the N-terminus.

13. An isolated antibody that binds specifically to the isolated polypeptide of claim 11.

14. A recombinant host cell that expresses the isolated polypeptide of claim 11.

15. A method of making an isolated polypeptide comprising:
(a) culturing the recombinant host cell of claim 14 under conditions such that said polypeptide is expressed; and
(b) recovering said polypeptide.

16. The polypeptide produced by claim 15.

17. A method for preventing, treating, or ameliorating a medical condition, comprising administering to a mammalian subject a therapeutically effective amount of the polynucleotide of claim 1.

18. A method of diagnosing a pathological condition or a susceptibility to a pathological condition in a subject comprising:
(a) determining the presence or absence of a mutation in the polynucleotide of claim 1; and
(b) diagnosing a pathological condition or a susceptibility to a pathological condition based on the presence or absence of said mutation.

19. A method of diagnosing a pathological condition or a susceptibility to a pathological condition in a subject comprising:
(a) determining the presence or amount of expression of the polypeptide of claim 11 in a biological sample; and
(b) diagnosing a pathological condition or a susceptibility to a pathological condition based on the presence or amount of expression of the polypeptide.

20. A method for identifying a binding partner to the polypeptide of claim 11 comprising:
(a) contacting the polypeptide of claim 11 with a binding partner; and
(b) determining whether the binding partner effects an activity of the polypeptide.

21. The gene corresponding to the cDNA sequence of SEQ ID NO:Y.

22. A method of identifying an activity in a biological assay, wherein the method comprises:
(a) expressing SEQ ID NO:X in a cell;
(b) isolating the supernatant;
(c) detecting an activity in a biological assay; and identifying the protein in the supernatant having the activity.

23. The product produced by the method of claim 20.

24. A method for preventing, treating, or ameliorating a medical condition, comprising administering to a mammalian subject a therapeutically effective amount of the polypeptide of claim 11.

The application's sequence listing, which the Patent Office published only in electronic form, follows.

SEQUENCE LISTING (384 sequences)

SEQ ID NO: 1 - DNA, 733 bp, Homo sapiens
gggatccggagcccaaatcttctgacaaaactcacacatgcccaccgtgcccagcacctgaattcgagggtgcaccgtcagtcttcctcttccccccaaaacccaaggacaccctcatgatctcccggactcctgaggtcacatgcgtggtggtggacgtaagccacgaagaccctgaggtcaagttcaactggtacgtggacggcgtggaggtgcataatgccaagacaaagccgcgggaggagcagtacaacagcacgtaccgtgtggtcagcgtcctcaccgtcctgcaccaggactggctgaatggcaaggagtacaagtgcaaggtctccaacaaagccctcccaacccccatcgagaaaaccatctccaaagccaaagggcagccccgagaaccacaggtgtacaccctgcccccatcccgggatgagctgaccaagaaccaggtcagcctgacctgcctggtcaaaggcttctatccaagcgacatcgccgtggagtgggagagcaatgggcagccggagaacaactacaagaccacgcctcccgtgctggactccgacggctccttcttcctctacagcaagctcaccgtggacaagagcaggtggcagcaggggaacgtcttctcatgctccgtgatgcatgaggctctgcacaaccactacacgcagaagagcctctccctgtctccgggtaaatgagtgcgacggccgcgactctagaggat

SEQ ID NO: 2 - protein, 5 aa, Homo sapiens
  misc_feature (3): Xaa equals any of the twenty naturally occurring L- amino acids
WSXWS

SEQ ID NO: 3 - DNA, 86 bp, Artificial Sequence
  Synthetic sequence with 4 tandem copies of the GAS binding site found in the IRF1 promoter (Rothman et al., Immunity 1:457-468 (1994)), 18 nucleotides complementary to the SV40 early promoter, and a Xho I restriction site.
gcgcctcgagatttccccgaaatctagatttccccgaaatgatttccccgaaatgatttccccgaaatatctgccatctcaattag

SEQ ID NO: 4 - DNA, 27 bp, Artificial Sequence
  Synthetic sequence complementary to the SV40 promoter; includes a Hind III restriction site.
gcggcaagctttttgcaaagcctaggc

SEQ ID NO: 5 - DNA, 271 bp, Artificial Sequence
  Synthetic promoter for use in biological assays; includes GAS binding sites found in the IRF1 promoter (Rothman et al., Immunity 1:457-468 (1994)).
ctcgagatttccccgaaatctagatttccccgaaatgatttccccgaaatgatttccccgaaatatctgccatctcaattagtcagcaaccatagtcccgcccctaactccgcccatcccgcccctaactccgcccagttccgcccattctccgccccatggctgactaattttttttatttatgcagaggccgaggccgcctcggcctctgagctattccagaagtagtgaggaggcttttttggaggcctaggcttttgcaaaaagctt

SEQ ID NO: 6 - DNA, 32 bp, Artificial Sequence
  Synthetic primer complementary to human genomic EGR-1 promoter sequence (Sakamoto et al., Oncogene 6:867-871 (1991)); includes a Xho I restriction site.
gcgctcgagggatgacagcgatagaaccccgg

SEQ ID NO: 7 - DNA, 31 bp, Artificial Sequence
  Synthetic primer complementary to human genomic EGR-1 promoter sequence (Sakamoto et al., Oncogene 6:867-871 (1991)); includes a Hind III restriction site.
gcgaagcttcgcgactccccggatccgcctc

SEQ ID NO: 8 - DNA, 12 bp, Homo sapiens
ggggactttccc

SEQ ID NO: 9 - DNA, 73 bp, Artificial Sequence
  Synthetic primer with 4 tandem copies of the NF-KB binding site (GGGGACTTTCCC), 18 nucleotides complementary to the 5' end of the SV40 early promoter sequence, and a XhoI restriction site.
gcggcctcgaggggactttcccggggactttccggggactttccgggactttccatcctgccatctcaattag

SEQ ID NO: 10 - DNA, 256 bp, Artificial Sequence
  Synthetic promoter for use in biological assays; includes NF-KB binding sites.
ctcgaggggactttcccggggactttccggggactttccgggactttccatctgccatctcaattagtcagcaaccatagtcccgcccctaactccgcccatcccgcccctaactccgcccagttccgcccattctccgccccatggctgactaattttttttatttatgcagaggccgaggccgcctcggcctctgagctattccagaagtagtgaggaggcttttttggaggcctaggcttttgcaaaaagctt

SEQ ID NO: 11 - DNA, 410 bp, Homo sapiens
  misc_feature (359): n equals a,t,g, or c
  misc_feature (362): n equals a,t,g, or c
  misc_feature (383): n equals a,t,g, or c
gggcacgcagaatctacagcttgtgtgttttaccgaactacgaaatagagaagtgtttggatggactggtgaactaggacctggaatttactggttaattccttccacaactggctgtaggctgaggaaaaaaataaaaccagtaacagatgaagcccaacttgtatatagagatgaaacaggggaattattccttacaaaggaatttaagtctactttatcagatatatttgaagtaattgatttagatggaaatggtcttcttagccttgaagaatataatttttttgaattgagaacagtggtgagaaatgtgatgaagatgcttggggcgtctgcagagagaatttgataccaanganggatgaactaaccaggaccanggtttatgggatttgaatctaatggaa

SEQ ID NO: 12 - DNA, 401 bp, Homo sapiens
cagatggcggaagcggaatttaaggaccatagtacagctatggatactgaaccaaacccgggaacatcttctgtgtcaacaacaaccagcagtaccaccaccaccaccatcammacttcctctctcgaatgcagcagccacagatctctgtctacagtggttcagaccgacatgctgtacaggtaattcaacaggcattgcatcggccccccagctcagctgctcagtaccttcagcaaatgtatgcagcccaacaacagcacttgatgctgcatamtgcagctcttcagcagcagcatttaagcagctcccagcttgggagccttgctgctgttcaggcaagtttgtccagtggaagaccatctacatctcccacagggaagtgtcacacagcagtcaag

SEQ ID NO: 13 - DNA, 439 bp, Homo sapiens
  misc_feature (48): n equals a,t,g, or c
  misc_feature (292): n equals a,t,g, or c
  misc_feature (429): n equals a,t,g, or c
tgtcttatgctagagttggtagaagaatacagactgacagtgaaaganagctactgcatttttgaatctggaacctgaccgatgctatcaagtgtgggtgatggctgtgaacttcactggatgtagcctgcccagtgaaagggccatctttaggacaggtaaggagatggatgctaagggtgcattagaagacaacgctcagttcttcacagactcttgagatcagccagtaagtgtttattaagcacctattgtgtgttgagtgttgtgcaaagtgctggttatacaacgntgacttaagcctggggtcctgttctcargaagctcatgctcaggtggggagatggaaaaacagaggatcatagaaaatgtgtggtaagggccatatccagatatacacaggttattatgagaacactccagaggggncacccaagtt

SEQ ID NO: 14 - DNA, 189 bp, Homo sapiens
acaccgcgctccagatcacccagcgcaagttggaggcggcccgtgcggcggacasgacagagcctacctggagggcacgtgcgtggagtggctccgcagatacctggagaacgggaagragacgctgcagccgcagaacccccaaagacacactgaacccaccaacccttttttgaaccatgaaggcca

SEQ ID NO: 15 - DNA, 834 bp, Homo sapiens
ggcacgagcagaaacctcctcaacgcactcagaatctcctgtggttgtggacctgccggacacccccttcatctttgagcacaccgtcaacaattccacagctgtgatttcctggacctacgccttgggcaagcagccggtcagtttctaccagctcctgttacaggaggtggccaagacacaggagaatgagttgcccgaggcaaagaatcgtccatggatcttcaacaagattttgggcactactgtcaagctgatggagctaaagcctaacacgtgttactgcctcagtgtccgtgcagccaacacagctggggtggggaagtggtgcaagccctacaaatttgcaaccctggccactgacttcagcagctttcctgagaactaccccatccagatcaccgtgcggcgcaaggaaccccggcaaaagatcgtgtccatcgggccggaggagatgcggaggctggaggatctggaatacctatttccctgttaagggggagggccccaggacacccctcacctactttcagcttcaaccccaggccctcagaaaccagagccatgagacctaccataccaccagcaccctgcgggcccggggtctggcagagtggtatgggcaccccacccctgggctggggccaaggctacataggggccccattcacctggaggcatctcaggccaggccatgccaggctcagccactgcccacagctgctagactccctcctcctccaaatctgggctgggtctaggtccctcattaaagaactgcaggtcawaaaaaaaaaaaaaaaaaaaaaaaaaaaaaaaaaaaaaaaaaaaaaa

SEQ ID NO: 16 - DNA, 397 bp, Homo sapiens
  misc_feature (334): n equals a,t,g, or c
  misc_feature (384): n equals a,t,g, or c
tcgacccacgcgtccggcgggtcacggcgccccgaaccctcctcctgctgctctggggggcagtggccctgaccgagacctgggccggctcccactccatgaggtatttctacaccgccatgtcccggcccggccgcggggagccccgcttcatcaccgtgggctacgtggacgacacgctgttcgtraggttcgacagcgacgccacgagtccgaggaaggagccgcgggcgccatggatagagcaggaggggccggagtattggggaccgggagacacagatcttccaagaccaacacacagactttaccgagagaacytgcgcamcsgttnccgytamttamaaccagascraggccsggttttcacatcatyccagaggnttaacggttgcga

SEQ ID NO: 17 - DNA, 316 bp, Homo sapiens
  misc_feature (233): n equals a,t,g, or c
  misc_feature (303): n equals a,t,g, or c
  misc_feature (314): n equals a,t,g, or c
cagatctccaagaccaacacacagacttaccgagagaacctgcggatcgcgctccgctactacaaccagagcgaggmcgggtctcacacttggcagacgatgtatggctgcgacgtggggccggacgggcgcctcctccgcgggcataaccagtacgcctacgacggcaaagattacatcgccctgaacgaagacctgagctcctggaccgcggcgggacaccgcggctcaanatcacccaacgcaagttggaagcggcccgttgaagcggaaccacttgaaaacctaccttgaaggcctgtncttgattttgntc

SEQ ID NO: 18 - DNA, 658 bp, Homo sapiens
  misc_feature (60): n equals a,t,g, or c
  misc_feature (88): n equals a,t,g, or c
  misc_feature (93): n equals a,t,g, or c
  misc_feature (619): n equals a,t,g, or c
  misc_feature (621): n equals a,t,g, or c
  misc_feature (634): n equals a,t,g, or c
tgaaacagctatgaccatgattacgccaagctcgaaattaaccctcactaaagggaacanaagctggagctccaccgcggtggcggcnggtcnagaactagtggatcccccgggctgcaggaattccgtgatcacatcactgcacttcatcctgggccatagtgagaccttgtctcaaaaaacaaataagcaaaaccccaaatctgcctggctggttctgagtattcccaggtaaaatgtttgaaacatgttagtcaagagttctgtgccaaaccactctagaggtttcttgcactgtacaagctagagaagtcttctttggtttccctatctttgctatttccctgcccctgcctgagaaacccaccctttggcccttctgctgtagctttttcagccaaccaagtgccggagaagctggatgtggtggtaattggcagtggctttgggggcctggctgcagctgcaattctagctaaagctggcaagcgagtcctggtgctggaacaacataccaaggcagggggctgctgtcatacctttggaaagaatggccttgaatttgacacaggtaaagctttgtgtggaaaagggttggggagcatggctgtatgtttgnanaagcttggagcancccttgtgggggtgatactgagca

SEQ ID NO: 19 - DNA, 579 bp, Homo sapiens
  misc_feature (435): n equals a,t,g, or c
  misc_feature (507): n equals a,t,g, or c
ggcacgagagccaatcagcgtcgccacgactcccgactataaagtccccatccggactcaagaagttctcaggactcagaggctgggatcatggtagatggaaccctccttttactcctctcggaggccctggcccttacccagacctgggcgggtgagtgcggggtcgggatggaaacggcctctaccgggagtagagaggggccggcccggcgggggcraaggaactcggggagccgcgccgggaggagggtcgggccgatctmagcccctcctcgcccccaggctcccactccttgaagtatttccacacttccgtgtcccggcccggccgcggggagccccgttcatctctgtgggctacgtggacgacacccagttcgtgcgcttcgacaacgacgccgcgagtccgaggatggtgccgcgggcgccgtnggatggagcaggargggtcagagtatttgggaccgggagacacggagcgccaagggacaccgcacagatttncgagttgaacttgcggacgttgcgcggttaatacaatcagagcgaaggccgggtcttaaaacctgcaatgga

SEQ ID NO: 20 - DNA, 2369 bp, Homo sapiens
tcccgcggagtccaggcttcaggctttcaccagttctcaggatgcccatagggatgggtgaagcctgcctggcctgtggtgctttccagtggccgtcatctcattagggccccacagtggcattaggatgcacctctcggcggtgttcaacgccctcctggtgtcggtgctggcagcggtcctgtggaagcatgtgcggctgcgtgagcatgcagccacactggaggaggagctggccctcagccgacaggccacagagccagccccagcactgaggatcgactacccgaaggcactgcagatcctgatggagggcggcacacacatggtgtgcacgggccgcacgcacacagaccgcatctgccgcttcaagtggctctgctactccaacgaggctgaggagttcatcttcttccatggcaacacctctgtcatgctgcccaacctgggctcccggcgcttccagccagccctgctcgacctatccaccgtggaggaccacaacactcagtacttcaacttcgtggagctgcctgctgctgccctgcgcttcatgcccaagccggtgttcgtgccagacgtggccctcatcgccaaccgcttcaaccccgacaacctcatgcacgtctttcatgacgacctgctgccactcttctacaccctgcggcagtttcccggcctggcccacgaggcacggctcttcttcatggagggctggggcgagggtgcacacttcgacctctacaagctgctcagccccaagcagcctctcctgcgggcacagctgaagaccctgggccggctgctgtgcttctcccatgcttttgtgggcctctccaagatcactacctggtaccagtatggctttgtgcagccccagggcccgaaggccaacatcctcgtctcaggcaatgagatccggcagtttgcacggttcatgacagaaaagctgaacgtgagccacacaggagtccccctaggcgaggagtacattctggtctttagccgaacccagaacagactcattctgaatgaggcagagctgctgctggcactggcccaggagttccagatgaagacagtgacagtgtccctggaggaccacacctttgctgatgtcgtgcggctggtcagcaatgcctccatgctggtcagcatgcatggggcccagctggtcaccaccctcttcctgccccgtggggcaactgtggtagagctcttcccatatgctgtcaatcccgaccactacactccctataagacgctggccatgctgcctggcatggacctccagtatgtagcctggcggaacatgatgccagagaacacagtcacacaccctgagcggccctgggatcaggggggcatcacccatctggaccgggctgagcaagcccgtatcctgcaaagccgtgaggtcccacggcatctctgttgccggaaccccgagtggctcttccgaatctaccaggacaccaaggtggacatcccatccctcattcaaaccatacggcgcgtggtgaagggccggccaggaccacggaagcagaagtggacagtcggcctatatccaggcaaggtgcgggaggcacggtgccaggcgtcagtgcatggcgcctccgaggcccgcctcactgtctcctggcagatcccatggaaccttaaatacctgaaggtgagggaggtgaagtacgaggtgtggctgcaggagcagggggagaacacctacgtgccttacatcctggctctgcagaaccacaccttcactgagaacatcaagcccttcaccacctacctggtgtgggtccgctgcatcttcaacaagatcctcctgggaccctttgcagatgtgctggtgtgcaacacgtagcgagcaggccacagcctggcctcgggaaggtggctcctgcagttcagcgtccctgggcccattaatcccactgtggagacttctgggaactatttattgagcaggcctgtgcctccacatcatcttgttgtctctggggtgtggtgtcacagcactcctctttgccctagagataagggacctgacttccccttctcccatcctgaacatttgtacccctggagaagttccttagcagggaggaggaagaggagaggaggaagcaaagaatcacaaggaacctctggctaggtgatcctgatgtttcctactgagtttttctggtatccagatttctggaaaccgagtaatcatgtactgtttgattgggtggttcatctgcttccatcccagtgaaatttacctgtagcccagtgaagggtgtgtttggaacattcattaaatgattctaagcaaaaaaaaaaaaaaaaaaaaaaaaaaaaaaaagtcgtatcgatgt

SEQ ID NO: 21 - DNA, 364 bp, Homo sapiens
  misc_feature (174): n equals a,t,g, or c
  misc_feature (312): n equals a,t,g, or c
  misc_feature (321): n equals a,t,g, or c
gacacagatctccaaggaccaacacacagacttaccgagagaacctgcgsaycgcgctccgctactacaaccagagcgaggccgggtctcacacttggcagacgatgtatggctgcgacstggggccggacgggcgcctcctccgcgggcataaccagttagcctacgacggcnaggattacatcgccctgaacgaggacctgagctcctggaccgcggcggacaccgcggctccagatcacccagctcaagtgggaagcggcccgtgtggcggaacaactgagacctacctggaaggcgaatgcttggatnggctccccnatacctggagaacgggaagagacgctgcagcgccgggaccccc

SEQ ID NO: 22 - DNA, 150 bp, Homo sapiens
  misc_feature (1): n equals a,t,g, or c
ncagcggagagcctacctggagggcacgtgcgtgggagtggctccgcagatacctggagaacgggaaggagacgytgcagccgcggraacacccaaagacacacgtgacccaccattcsctctytgaccatgargccaacctgagttgtt

SEQ ID NO: 23 - DNA, 303 bp, Homo sapiens
  misc_feature (270): n equals a,t,g, or c
  misc_feature (276): n equals a,t,g, or c
cagatcttcaagaccaacacacaggacttaccgagagaacctgcggatcgcgctccgctactacaaccagagcgaggccgggtctcacatcatccagrwgatgtatggctgcgacctggggcccgacgggcgcctcctccgcgggcatgaccagtccgcctacgacggcgaggattacatcgccctgaacgaagacctgagctcctggaccgcggcgggacaccgcggctcagatcacccagcgcaagttggaagcggcccgtgttgcgngaacanctgaaaacctacctggaaggcctgtgc

SEQ ID NO: 24 - DNA, 1001 bp, Homo sapiens
gctaaagtctgcgaggaggaagtcgcctctgtgctcgtgagtccagggatctaagagccccacagtcttcgttacaacctcatggtgctgtcccaggatggatctgtgcagtcagggtttctcgctgagggacatctggatggtcagcccttcctgcgctatgacaggcagaaacgcagggcaaagccccagggacagtgggcagaagatgtcctgggagctragacctgggacacagagaccgaggacttgacagagaatgggcaagacctcaggaggaccctgactcatatcaaggaccagaaaggaggcttgcattccctccaggagattagggtctgtgagatccatgaagacagcagcaccaggggctcccggcatttctactacaatggggagctcttcctctcccaaaacctggagactcaagaatcgacagtgccccagtcctccagagctcagaccttggctatgaacgtcacaaatttctggaaggaagatgccatgaagaccaagacacactatcgcgctatgcaggcagactgcctgcagaaactacagcgatatctgaaatccggggtggccatcaggagaacagtgccccccatggtgaatgtcacctgcagcgaggtctcagagggcaacatcaccgtgacatgcagggcttccagcttctatccccggaatatcacactgacctggcgtcagkatggggtatctttgagccacaacacccagcagtggggggatgtcctgcctgatgggaatggaacctaccagacctgggtggccaccaggattcgccaaggagargagcagargttcacctgctacatggaacacagcgggaatcacggcactcaccctgtgccctytgggaaagggctggtgcttcarartcaacggacagactttycatatktttctgctgctatgccawgttttkgtattattattattcyctgtgtcccttgttgcaaaaaaaaaacttcagcggcaaa

SEQ ID NO: 25 - DNA, 223 bp, Homo sapiens
  misc_feature (185): n equals a,t,g, or c
gcgggtctcagcccctcctcgcccccargctcccactccatgaggtatttckacaccgcygtgtcccggcccggccgcggggagccccacttcatcgcagtgggctacgtggacgacacgcattcgtgcggttcgacagcgacgccgcgagtccgagaagggagccgcgggcgccgtgggtggancaagaggggccggagtattgggaccgggagacacagaa

SEQ ID NO: 26 - DNA, 433 bp, Homo sapiens
  misc_feature (193): n equals a,t,g, or c
  misc_feature (197): n equals a,t,g, or c
  misc_feature (375): n equals a,t,g, or c
  misc_feature (406): n equals a,t,g, or c
agatgcgggtcacggcgccccgaaccgtcctcctgctgctctcgggagccctggccctgaccgagacctgggccggctcccactccatgaggtatttctacaccgccatgtcccggcccggccgcggggagccccgcttcatcgcagtgggctacgtggacgacacccagttcgtgaggttcgacagcgacgnccgngagtccgaggatggcgccccgggccattgggatagagcaggaggggccggagtattgggaccgggagacacagatctccaagaccaacacacagayttaccgagagagcytgcggaacytgcgcggstaytacaaccagagcgaggccgggtctcacaccctccagaggatgtacggnttggacgtggggccggacggcgcttcttcgnggcatgacaagccgctacaaggcagga

SEQ ID NO: 27 - DNA, 1094 bp, Homo sapiens
ggcacgaggtggtgcggccccttggagcgccggaagcccgcagtgccggaggcccgcagcgccggaacctcagaggcgggtcgcagcggcgcagaggagggctgaagaagatgcagagcagcctgaagctggtggactgtatcatcgaggtccacgatgcccggatcccactttcaggccgcaaccctctgtttcaggaaacccttgggcttaagcctcacttgctggtcctcaacaagatggacttggcggatcttacagagcagcagaaaattatgcaacacttagaaggagaaggcctaaaaaatgtcatttttaccaactgtgtaaaggatgaaaatgtcaagcagatcatcccgatggtcactgaactgattgggagaagccaccgctaccaccgaaaagagaacctggagtactgtatcatggtcattggggtccccaacgtgggcaagtcctccctcatcaactccctccggaggcagcacctcaggaaaggtactggcgcgtgcggctgatcacctcaggaaaggtactggcgcgtgtggctgatgtgctgatgccaccatctttcttggaggggacgtgcccgaggagcactgccagtcttctgctgaccccgcagccccagagcacaccttgtctcgttcagtccagttcacaggagggctgaacagtgggaccaggtcgttctgtgaatttcacacttaatttttctctcttttaaaatctttaacatgaagatggcttttctaaactttgatatttgttcatttatttaaatccctttggccgggtgcatggctcacgcctgtaatcccagcactttgagaggccgagacgggcggatcatgaggtcaggagattgagaccattcttgctgaaacggtgaaaccccgtctctactaaaaatacgaaaaattaggtgggtgtggtggcgggcacctgtagtcccagccacttaggaggctgaggcaggagaatggcgtgaacccgggaggcggagcttgcagtgagttgagattgtgccactgcgttccagcctgggcgacagagcgagactccgtctcaaaaaaaaaaaaaaaaaaaaaaaa

SEQ ID NO: 28 - DNA, 862 bp, Homo sapiens
  misc_feature (138): n equals a,t,g, or c
  misc_feature (649): n equals a,t,g, or c
  misc_feature (704): n equals a,t,g, or c
  misc_feature (855): n equals a,t,g, or c
tcgacccacgcgtccgcccacgcgtccggtaattcctgaaacatctgtatccagtactgtttccagcacacaaactatggtaacccagcagaccattaaaactgaatcatccagtacaaatggggcagttgttaaagntgaaacttcactaacaacattcagtaccaaatctgaagttgatgaaacatatgcactgcctgcaacgaagatcagccgtgtagagacacatgctacagcaacgccgttttctaaataaataactgaagtgcacatttgttttgagcttctggaaacagtgtctcatttataagaagatggctttaaaagraagagactccttcaaatccagtggccacagtgaaagcgggagaacgacaatggtgtgatgtgggaatttttaaaaataatacagctttggtgagccagttttatttgctgccaaaagggaagcaaagcatctcaaaggtaggaaatgcagatgtacctgactacagcttgcttaagaaacaagatcttgttccaggcacaggatacagattcagggttgctgcaatcaatggttgtgggataggtcctttcagcaaaatcagtgaatttaaaacttgtattcctggttttcctggagctccttctgcagtcagaatttcanagaatgttgaaggtatccacctttcctgggaacctccaacctcaccttctggaanatattttggaatattcagcctacttggctatccgcacagcacagatacaagataatccaagtcaacttgtgttcatgaggatttattgtggtcttaagacatcatggatagtaactgctgggcaactggcaaatgcacatattggattatncatccat

SEQ ID NO: 29 - DNA, 1210 bp, Homo sapiens
  misc_feature (658): n equals a,t,g, or c
  misc_feature (1183): n equals a,t,g, or c
  misc_feature (1189): n equals a,t,g, or c
gaggatgacaacctggaggagggggtcctggagcaagccgacatcgaagtacgggcactgcaggtggccctgggtgcacatctacgagatgccaggcgcgggcagaggctccgctcaggggcgcacgtagtggtcactggaccccccaatgcgggcaagagcagcctagtgaacctgctcagtcggaagcctgtgtccatcgtgtccccggagccagggaccacccgtgacgtgctggagaccccagtcgacctggccggatttcctgtgctgctgagcgacacggctgggttgcgggagggcgtggggcccgtggagcaggagggcgtgcggcgcgcccggkagaggctagagcaggctgacctcattctggccatgctggatgcttctgacctggcctctccctccagttgcaacttcctggccaccgtcgtagcctctgtgggagcccagagccccagtgacagcagccagcgcctcctcctggtgctgaacaagtcggacctgctgtccccggagggcccaggtcccggtcctgacctgcccccgcacctgctgctgtcctgtctgacgggagaggggctggacggcctyctggaggcgctgaggaaggagctagctgcagtgtgtggggacccgtccacagatcccccgctgntgacccgagcaaggcaccagcaccacctccagggttgcctggatgccctcggccactacaagcagtcaaaagacctggccctggcggcagaggcgctgcgggtggcccggggtcacctgacccggctcacaggtggagggggtaccgaggagatcctggacatcatcttccaggacttctgtgtgggcaagtgacgggatccagggaagtcgcacccaagctgcgtggagacccaggagcctcgggggatctggaaacagtttaggccaattgggattctcattcgcctgggaaagaacttgattctcaaatagtgaagcaacacagctgagaggtagtgagatccctgcagggactccctggagattcaggccctggaatggggctgaatggaggtcccgttcgacccttgatgctggggcatccgggttgggatggagataggaggatctcagtatatttgtttcgtagttttttatttattttgcaaataccaaaggaatgtaaaaaaaaaaaaaaaaaggncggccnctctaggggtcccagcttacg

SEQ ID NO: 30 - DNA, 397 bp, Homo sapiens
cggagccgccgccactcatctctgcccagctgctgccctccccaggaggcctccatggcttcacctacctccaccaacccagcgcatgcccactttgagagcttcctgcaggcccagctgtgccaggacgtgctgagcagcttccaggagctgtgtggggccctggggctggaacccggtggggggctgccccagtaccacaagatcaaggaccagctcaactactggagcgccaagtcactgtggaccaagctggacaagcgagcaggccagcctgtctaccagcagggccgggcctgcaccagcaccaagtgcctggtggtgggtgctggaccttgcgggctgcgggtcgctgtggarctggcgctkctgggggcccgagtggtgctggtggaaa

SEQ ID NO: 31 - DNA, 1204 bp, Homo sapiens
  misc_feature (995): n equals a,t,g, or c
gccggtccccacctccatgccttgccctgtcctgctgggccctgccctggacctgggctggagaaggatggaactcttgcaccggagcagcgagagaaccctgagctacgccaaggcgcggcaggagccggaagagcagagcctccaaaagctttatcaaaaccgggagaagtccgaggagcaactgaccctgaagcaagaggaagccttccgcagctactttgagatcttcaatggtcctggtgaggtggatgcacagagcctgaagaatatcctgctcctaatgggcttctctgtgacgctggcccaggtggaggacgccctgatgagtgctgatgtcaatggagatggtcgtgtggacttcaaagacttcttggctgtgatgacagacaccaggcgcttcttctgctctgtggaacagaacgccctgtcggacatggctccccacaacccccacactctactctttgagatcctgtccctgctggtagagatgctggccttaccagaggcagtcttagaggaaatcacaaactactaccagaaaaagctgaaggaaggcacctgcaaggcccaggagatggaagcggccgtaggccggctgcggttgcagaagcttccctacaacccccagcaagaagagagctcagaagttccagaacgaaaggtcctcagtatcctgagccggctgaagcagcagaactatgctcccaacctgcagagcccctatgcccaggtgccctgcatcctgctctgcccacagctggacaagaagatggtccgtaggcagccgagcaaccactatgcactagaccagtgcacaccccctggcctggatcctgacatccgcagccccttcttccagtcaggatctcaaggaaacagggaacacaactctgacagcagaaagtggctcagctctgtgccagctcgaacccactgaccctctggaggcctgactctaggcagctgctcaaggcctgtakacagatggnccaccaggcaggagctgctgctggratttgcttttgtggcctggtgagctaataaacaccaataacttcaaaaaaaaaaaaaaaaaaaaaaaaaaaaaaaaaaaaaaaaaaaaaaaaaaaaaaaaaaaaaaaaaaaaaaaaaaaaaaaaaaaaaaaaaaaaaaaaaaaaaaaaaaaaaaaaaaaaaaaaaaaacttgggggggggcccc

SEQ ID NO: 32 - DNA, 1297 bp, Homo sapiens
ggcacgagctcctttctcagtattaaatccactttaaaggatgaaatcattgagcgtaatatcatcttggaaaaagtcactcagcgtgatcttcgcaggaagtttgtttgctttgtccagaactccattggaaacacaacccagtccgtccaactgaaagaaaagagaggagtggtgctcctgtacatcctgcttggcaccatcgggaccctggtggccgtgctggcggcgagtgccctcctctacaggcactggattgaaatagtgctgctgtaccggacctaccagagcaaggatcagacgcttggggataaaaaggattttgatgctttcgtatcctatgcaaaatggagctcttttccaagtgaggccacttcatctctgagtgaagaacacttggcccagagcctatttcctgatgttttagaaaacaaatatggatatagcctgtgtttgcttgaaagagatgtggctccaggaggagtgtatgcagaagacattgtgagcattattaagagaagcagaagaggaatatttatcttgagccccaactatgtcaatggacccagtatctttgaactacaagcagcagtgaatcttgccttggatgatcaaacactgaaactcattttaattaagttctgttacttccaagagccagagtctctacctcatctcgtgaaaaaagctctcagggttttgcccacagttacttgtagaggcttaaaatcagttcctcccaattctaggttctgggccaaaatgcgctaccacatgcctgtgaaaaactctcagggattcacgtggaaccagctcagaattacctctaggatttttcagtggaaaggactcagtagaacagaaaccactgggaggagctcccagcctaaggaatggtgaaatgagccctggagccccctccagtccagtccctgggatagagatgttgctggacagaactcacagctctgtgtgtgtgtgttcaggctgataggaaattcaaagagtctcctgccagcaccaagcaagcttgatggacaatggaatgggattgagactgtggtttagagcctttgatttcctggactggacagacggcgagtgaattctctagaccttgggtactttcagtacacaacacccctaagatttcccagtggtccgagcagaatcagaaaatacagctacttctgccttatggctagggaactgtcatgtctaccatgtattgtacatatgactttatgtatacttgcaatcaaataaatattattttattaaaaaaaaaaaaaaaaaa

SEQ ID NO: 33 - DNA, 3466 bp, Homo sapiens
  misc_feature (3194): n equals a,t,g, or c
  misc_feature (3465): n equals a,t,g, or c
gagcgagggagcgagggagggagcgaaggaggtagagaagagtggaggcgccaggggagggagcgtagcttggttgctccgtagtacggcggctcgcgaggaagaatcccgagcgggctccgggacggacagagaggcgggcggggatggtgtgcggggctgcggctcctgcgtccctcccagcggcgcgtgagcggcactgatttgtccctggggcggcagcgcggacccgcccggagatgaggcgtcgattagcaaggtaaaagtaacagaaccatggctcagtttccaacaccttttggtggcagcctggatatctgggccataactgtagaggaaagagcgaagcatgatcagcagttccatagtttaaagccaatatctggattcattactggtgatcaagctagaaactttttttttcaatctgggttacctcaacctgttttagcacagatatgggcactagctgacatgaataatgatggaagaatggatcaagtggagttttccatagctatgaaacttatcaaactgaagctacaaggatatcagctaccctctgcacttccccctgtcatgaaacagcaaccagttgctatttctagcgcaccagcatttggtatgggaggtatcgccagcatgccaccgcttacagctgttgctccagtgccaatgggatccattccagttgttggaatgtctccaaccctagtatcttctgttcccacagcagctgtgccccccctggctaacggggctccccctgttatacaacctctgcctgcatttgctcatcctgcagccacattgccaaagagttcttcctttagtagatctggtccagggtcacaactaaacactaaattacaaaaggcacagtcatttgatgtggccagtgtcccaccagtggcagagtgggctgttcctcagtcatcaagactgaaatacaggcaattattcaatagtcatgacaaaactatgagtggacacttaacaggttcctgtttaggtccccaagcaagaactattcttatgcagtcaagtttaccacaggctcagctggcttcaatatggaatctttctgacattgatcaagatggaaaacttacagcagaggaatttatcctggcaatgcacctcattgatgtagctatgtctggccaaccactgccacctgtcctgcctccagaatacattccaccttcttttagaagagttcgatctggcagtggtatatctgtcataagctcaacatctgtagatcagaggctaccagaggaaccagttttagaagatgaacaacaacaattagaaaagaaattacctgtaacgtttgaagataagaagcgggagaactttgaacgtggcaacctggaactggagaaacgaaggcaagctctcctggaacagcagcgcaaggagcaggagcgcctggcccagctggagcgggcggagcaggagaggaaggagcgtgagcgccaggagcaagagcgcaaaagacaactggaactggagaagcaactggaaaagcagcgggagctagaacggcagagagaggaggagaggaggaaagaaattgagaggcgagaggctgcaaaacgggaacttgaaaggcaacgacaacttgagtgggaacggaatcgaaggcaagaactactaaatcaaagaaacaaagaacaagaggacatagttgtactgaaagcaaagaaaaagactttggaatttgaattagaagctctaaatgataaaaagcatcaactagaagggaaacttcaagatatcagatgtcgattgaccacccaaaggcaagaaattgagagcacaaacaaatctagagagttgagaattgccgaaatcacccatctacagcaacaattacaggaatctcagcaaatgcttggaagacttattccagaaaaacagatactcaatgaccaattaaaacaagttcagcagaacagtttgcacagagattcacttgttacacttaaaagagccttagaagcaaaagaactagctcggcagcacctacgagaccaactggatgaagtggagaaagaaactagatcaaaactacaggagattgatattttcaataatcagctgaaggaactaagagaaatacacaataagcaacaactccagaagcaaaagtccatggaggctgaacgactgaaacagaaagaacaagaacgaaagatcatagaattagaaaaacaaaaagaagaagcccaaagacgagctcaggaaagggacaagcagtggctggagcatgtgcagcaggaggacgagcatcagagaccaagaaaactccacgaagaggaaaaactgaaaagggaggagagtgtcaaaaagaaggatggcgaggaaaaaggcaaacaggaagcacaagacaagctgggtcggcttttccatcaacaccaagaaccagctaagccagctgtccaggcaccctggtccactgcagaaaaaggtccacttaccatttctgcacaggaaaatgtaaaagtggtgtattaccgggcactgtacccctttgaatccagaagccatgatgaaatcactatccagccaggagacatagtcatggtggatgaaagccaaactggagaacccggctggcttggaggagaattaaaaggaaagacagggtggttccctgcaaactatgcagagaaaatcccagaaaatgaggttcccgctccagtgaaaccagtgactgattcaacatctgcccctgcccccaaactggccttgcgtgagacccccgcccctttggcagtaacctcttcagagccctccacgacccctaataactgggccgacttcagctccacgtggcccaccagcacgaatgagaaaccagaaacggataactgggatgcatgggcagcccagccctctctcaccgttccaagtgccggccagttaaggcagaggtccgcctttactccagccacggccactggctcctccccgtctcctgtgctaggccagcctgacttcctcctccacccctccatgagactaggccacatgcagccccggattgtgcttctcttcccggaccccctgcagtgttccacctcgaggcttttgcccatgctgcgccctcggcctggagtgcccttcctccgaagccctagctgtcaaagtccttctcatccttcaaggsccatctcagatgctgncccctctgtgaaatttacgctgatgcccccaggcagaattcatccctgktttctctttattcctgcagtgaatagtaggaactcctttttagkatatttcattctgscaggtggtacacttggktggttttatctctgkcttycccattacttgggaattacctgctagtaatactgccatctttatagtgctttgggggtaataaagkgcttttccctaaattaaaaaaaaaaaaaaaaactcgagggggggggccggtacccaatttgnc

SEQ ID NO: 34 - DNA, 955 bp, Homo sapiens
  misc_feature (550): n equals a,t,g, or c
  misc_feature (934): n equals a,t,g, or c
  misc_feature (942): n equals a,t,g, or c
  misc_feature (944): n equals a,t,g, or c
  misc_feature (948): n equals a,t,g, or c
ggttttctccattaatttctgctcgttttggaatgggaagcatgcccaatctgtccattcctcagccattgcctccagctgcacctataacatcattgtcttctgcgacttcagggaccaaccttcctcccttaatgatgcccactcccctagtgccttctgttagcacatcatcattaccaaatggaaccgccagtctcattcagcctttacccattccttattcttcttcaacattgcctcatgggtcatcttatagtctgatgatgggaggatttggaggtgctagtatacagaaagcgcagtctctgattgatttaggatctagtagctcaacttcctcgactgcttcactctcagggaactcacccaagactgggacctcagagtgggcagttcctcagcctacaagattaaaatatcggcaaaaatttaatactcttgacaaaagtatgagtggatatctctcaggttttcaagctagaaatgcccttcttcagtcaaatctttctcaaactcagctggctactatttggactctggctgacgntgatggtgatggacagctaaaagcagaagagtttattcttgcaatgcaccttactgrcatggccaaagctggacagccattaccactgactttacctcctgagcttgttcctccatctttcaggtgagtgtgcctggaggtggagaactatggttttgataacttggcagatgtgatttagaagagagttaaatatttgcactgccattgattttagtattcaacaagttatacttgaaaagggtacatattagaagtaggtgtgggccaggcgtggcagcttacgcctgtaatcataacactggggagccaaggtggggaggatcacatgaggccggggagttccaggaccagcgtgggacaacatagtgagaccccgtatcntaccaaantnaaantaattag

SEQ ID NO: 35 - DNA, 536 bp, Homo sapiens
  misc_feature (491): n equals a,t,g, or c
aattcggcacgagtcccggtggtgagggcagtggagcacccagcaggccgccaacatgctctgtctgtgcctgtacgtgccggtcatcggggaagcccagaccgagttccagtactttgagtcgaaggggctccctgccgagctgaagtccattttcaagctcagtgtcttcatcccctcccaggaattctccacctaccgccagtggaagcagaaaattgtacaagctggagataaggaccttgatgggcagctagactttgaagaatttgtccattatctccaagatcatgagaagaagctgaggctggtgtttaagagtttggacaaaaagaatgatggacgcattgacgcgcaggagatcatgcagtccctgcgggactttgggagtcaagatatctgaacagcaggcagaaaaawttctcaagagcakggwtaaaaacggcacgatgaccatcgactggaacgagtggagagactaccacctcctncaccccgtggaaaacatccccgagatcatcctctactggagcatt

SEQ ID NO: 36 - DNA, 774 bp, Homo sapiens
tgggtacgggccccccctcgagttttttttttttttttttttaaaaatttttaaatgtttaatcacaagtcwgtagcatgacatcattagtagagtagagtctgctgacattacaatctattgatctccccagagttaccaaaagtagttcacaatagttaggcttccttctgtccatagttcagggcatattcaaagtctctaaagctgacgtgaccatctgaatctcgatctacttccctgaatacctcaagaacagtcctttccggtaatttgggagccacctgcctaaatgcttttttgaaatcttccaaagttaaaaatccacgatagtaggtgtcaaaggctgtgaagatgtgtcttacttcgttccgatatcgttgagcttccttctttttcctgacaatatttaaaaacccctcgagtaatataccagaagtatttggatttattgaagacatcacagaatccacttctatcttggagggcttgtacccaaacagcattacaacagcagttttaaagtcctctctgctgagatatcctttgtgatcttcatcacatgctttaaatacttccacccacttcctgtgttccgagggactggcttcccacgtccgcgacctggctctggcctcggagaagaacatcgcgactacaacaaccgagcyccgtgccgaattcctgcagcccgggggrtccactagttctagagcggccgscaacgcggtggagtccagcttttgttcctttagtgagggtaatttcgagctt

SEQ ID NO: 37 - DNA, 450 bp, Homo sapiens
  misc_feature (332): n equals a,t,g, or c
  misc_feature (398): n equals a,t,g, or c
tccacgcctgcaggtaccggtccggaattcccgggtcgacccacgctttcgttgggaacgcatcctggagatcttcttcagacacctttttgctcaggtgctggacatcaaccaggccgacgcagggaccctgcccctggactcctcccagaaggtgcgggaggccctgacctgcgagctgagcagggccgagtttgccgagtccctgggcctcaagccccaggacatgtttgtggagtccatgttctctctggctgacaaggatggcaatggctacctgtccttccgagagttcctggacatcctggtggtcttcatgaaaggctccccanaggataagtcccgtctaatgtttaccatgtatgacctggatgagaatggcttcctttccaaggacnaattcttcaccatgatgcgatccttcatcgagatcttccaacaactgcctgt

SEQ ID NO: 38 - DNA, 757 bp, Homo sapiens
  misc_feature (80): n equals a,t,g, or c
  misc_feature (659): n equals a,t,g, or c
  misc_feature (664): n equals a,t,g, or c
  misc_feature (756): n equals a,t,g, or c
ggtgacttcctcggccaggccgtctgcgcctctgggaccatgttgcgctggctgcgggacttcgtgctgcccaccgcggnctgccaggacgcggagcagccgacgcgctacgagaccctcttccaggcactggaccgcaatggggacggagtggtggacatcggcgagctgcaggaggggctcaggaacctgggcatccctctgggccaggacgccgaggagaaaatttttactactggagatgtcaacaaagatgggaagctggattttgaagaatttatgaagtaccttaaagaccatgagaagaaaatgaaattggcatttaagagtttagacaaaaataatgatggaaaaattgaggcttcagaaattgtccagtctctccagacactgggtctgactatttctgaacaacaagcagagttgattcttcaaagcattgatgttgatgggacaatgacagkggactggaatgaatggagagactacttcttatttaatcctgktacagacattgargaaattatccgtttctggaaacattctacaggaattgacataggggatagcttaactattccagatgaattcacggaagacgaaaaaaaatccggacaatggtggaggcagcttttggcaggaggcattgctggtgctgnctctngaacaagcactggccctttggaccgtctgaaaatcatgatgcaggttacgggtcaaaatcagacaaaatgaacatatttgggggctttcgant

SEQ ID NO: 39 - DNA, 533 bp, Homo sapiens
  misc_feature (5): n equals a,t,g, or c
  misc_feature (6): n equals a,t,g, or c
  misc_feature (8): n equals a,t,g, or c
  misc_feature (22): n equals a,t,g, or c
  misc_feature (491): n equals a,t,g, or c
gtcanncngccagtcacggtcngaattcccgggtcgacccacgcgtccgggccctggctgagaggcgttaggagtccgggggttcgcccgcggaggccggggagcagccgaccatggagccccagaaaatcatgccaccctcaaagcctcatccacctgtcgtsggcaaagtgactcatcacagcattgaattatactgggatctggaaaagaaagccaaacgccaaggacctcaagagcagtggttcagsttctcgattgaagaagaagaccccaaaatgcacacttatggtatcatttatacgggatatgcaacgaagcatgttgttgaargtctggaaccaaggacgctgtacagatttcgcctgaaggtcaccagcccctctggggagtgtgagtacagcccactcgtctcagtgtctacaaccagagagcccataagtagtgagcacttgcaacgggctgtcagtgtgaatgatgaagatttgctngtccgaatacttcaaaggaggccgtgttaaaggttatgttcc

SEQ ID NO: 40 - DNA, 967 bp, Homo sapiens
  misc_feature (659): n equals a,t,g, or c
  misc_feature (697): n equals a,t,g, or c
  misc_feature (715): n equals a,t,g, or c
  misc_feature (869): n equals a,t,g, or c
  misc_feature (879): n equals a,t,g, or c
ggggctgaggcggcgcggcggacctgcagcggcggtgagcaggctacgcacaggtgcgggggcggcgcctggacgaccgaggccagctgcagtggcggcgagggcgggcagagcagggtctccccgcgcctgcccgcgcgcagggtggcggtgctgagggacgcggagtcgccgtgtgacgtgcgggaggcgcgcgagggccagcatggctgagagctagcaaggaaaactcaggaccatgatggctcagtttcccacagctatgaatggagggccaaacatgtgkgctattacctctgaagaacgtactaagcatgacaggcagtttgataacctcaaaccttcaggaggttacataacaggtgatcaagcacgtaattttytcctacaatcaggtctgccggcccctgttttagctgaaatatgggctttatcagacctaaacamgkatgggaagatggatcagcaagagttctccatagctatgaaactcatcaaactgaagcttcaaggccaacagttgcctgtggttctccctcctattatgaagcaaccccctatgttttctccattaatttctgctcgttttggaatgggaagcatgcccaatctgtccattcctcagccattgcctccagctgcacctataacatcattgncttctgcgacttcagggaccaacctttcttcccttaangatgcccactcccctagngccttctgttagcacatcatcattaccaaatggaaaccaccttcagtaccattagcccaccataccaagtaacaagttaggcaggaatcgtgggaatttattgagtcaagctttgagtgtttgagagaatgtaaacaagattggctcgaattgnaaacgtttgnactttggatgaagtcatgggtctttaggtcaccttaataccagctatctttggtagaagctacagcattcaagtttctctggaaactg

SEQ ID NO: 41 - DNA, 1951 bp, Homo sapiens
gaattcccgggtcgacccacgcgtccgggaagcgtgaacccggtcctttccctttccgtccatcccagaccccgacttgctccgacacagccgctaggtcccagggagaaatcagctagtgattcccactttccgccctgtatcttgttcttcccccgcttgtttttgtgttcttgccccatgcctgatttctcgtcccccacccagggagcgagtcaaggccatgttctaccacgcctacgacagctacctggagaatgcctttcccttcgatgagctgcgacctctcacctgtgacgggcacgacacctggggcagtttttctctgactctaattgatgcactggacaccttgctgattttggggaatgtctcagaattccaaagagtggttgaagtgctccaggacagcgtggactttgatattgatgtgaacgcctctgtgtttgaaacaaacattcgagtggtaggaggactcctgtctgctcatctgctctccaagaaggctggggtggaagtagaggctggatggccctgttccgggcctctcctgagaatggctgaggaggcggcccgaaaactcctcccagcctttcagacccccactggcatgccatatggaacagtgaacttacttcatggcgtgaacccaggagagacccctgtcacctgtacggcagggattgggaccttcattgttgaatttgccaccctgagcagcctcactggtgacccggtgttcgaagatgtggccagagtggctttgatgcgcctctgggagagccggtcagatatcgggctggtcggcaaccacattgatgtgctcactggcaagtgggtggcccaggacgcaggcatcggggctggcgtggactcctactttgagtacttggtgaaaggagccatcctgcttcaggataagaagctcatggccatgttcctagagtataacaaagccatccggaactacacccgcttcgatgactggtacctgtgggttcagatgtacaaggggactgtgtccatgccagtcttccagtccttggaggcctactggcctggtcttcagagcctcattggagacattgacaatgccatgaggaccttcctcaactactacactgtatggaagcagtttggggggctcccggaattctacaacattcctcagggatacacagtggagaagcgagagggctacccacttcggccagaacttattgaaagcgcaatgtacctctaccgtgccacgggggatcccaccctcctagaactcggaagagatgctgtggaatccattgaaaaaatcagcaaggtggagtgcggatttgcaacaatcaaagatctgcgagaccacaagctggacaaccgcatggagtcgttcttcctggccgagactgtgaaatacctctacctcctgtttgacccaaccaacttcatccacaacaatgggtccaccttcgacacggtgatcaccccctatggggagtgcatcctgggggctggggggtacatcttcaacacagaagctcaccccatcgaccctgccgccctgcactgctgccagaggctgaaggaagagcagtgggaggtggaggacttgatgagggaattctactctctcaaacggagcaggtcgaaatttcagaaaaacactgttagttcggggccatgggaacctccagcaaggccaggaacactcttctcaccagaaaaccatgaccaggcaagggagaggaagcctgccaaacagaaggtcccacttctcagctgccccagtcagcccttcacctccaagttggcattactgggacaggttttcctagactcctcataaccactggataatttttttatttttatttttttgaggctaaactataataaattgcttttggctatcaaaaaaaaaaaaaaaaaaaaaaaaaaaaaaaaaaaaaaaaaaaaaaaa

SEQ ID NO: 42 - DNA, 1313 bp, Homo sapiens
  misc_feature (253): n equals a,t,g, or c
actcctgtatcaaccatgagttcttctcagcctgtgtcacgaccattgcaacccatacaaccagcaccgcctcttcaaccatctggggtgccaacaagtggaccatctcagaccaccatacacttactacctacagctccaactaccgtgaatgtaacacatcgtccagtaactcaggtgaccacaagactccctgtaccaagagctcctgcaaaccaccaggtggtttatacaactcttcctgcaccaccangctcaggctcccttgcgaggaactgttatgcaggctcctgctgttcggcaggtcaatccccaaaatagtgttacagttcgagtgcctcaaacaaccacatatgttgtaaacaatggactaaccctgggatcaacaggacctcagctcacagtgcatcaccgaccaccacaagtgcatactgagcccccacgccccgtgcacccagcacccttaccagaagctccacaaccacagcgtctgcccccagaagctgccagcacatctctgcctcagaagccacacttgaagttagcacgcgttcagagtcaaaatggcatagtactgtcatggagtgtcctggaggtggatcgaagctgtgccactgttgatagctaccatctctatgcttaccatgaggaacccagtgccactgtgccctcacaatggaaaaagattggggaagtcaaggcacttcccttgcccatggcatgtactctcacccagtttgtatctggtagcaaatactactttgcagtacgagccaaggatatttatggacgttttgggcctttctgtgatcctcagtcaacagatgtgatctcttctacccagagcagttaaaccttggagcctttatattttcctcttttaaaatttccaccttttggtcttgtttttaatcttgtgcatgataccccatgtaaaatccaccttgtgcaagatttcttggacagatgtgtgtatacactacatttgtttataaccagaagcaaaataaactcagcccacaaagctagaatcttttcctggacagtttaggctttggggtttggaaatgtaaatgtgtaccttgctttagttttgaggctggggaatatgtgtgggtgtttatgtgtgtttttccttatgtaggtgttattgcattggagtctcccattttcattctcaaatttacctcttaaagtacgaagtaagtagatcaaaggatttgagatgtgtaactggcatgattctgcttttgaaggatctatagtatcattttagttaagtgggtcaaacagaatcaaaacaaaacccaaag

SEQ ID NO: 43 - DNA, 2821 bp, Homo sapiens
  misc_feature (2815): n equals a,t,g, or c
  misc_feature (2816): n equals a,t,g, or c
gccttactcgtatatttaaaatatctgatcaagataatgatggtactctcaatgatgctgaactcaacttctttcagaggatttgtttcaacactccattagctcctcaagctctggaggatgtcaagaatgtagtcagaaaacatataagtgatggtgtggctgacagtgggttgaccctgaaaggttttctctttttacacacactttttatccagagagggagacacgaaactacttggactgtgcttcgacgatttggttatgatgatgacctggatttgacacctgaatatttgttccccctgctgaaaatacctcctgattgcactactgaattaaatcatcatgcatatttatttctccaaagcacctttgacaagcatgatttggatagagactgtgctttgtcacctgatgagcttaaagatttatttaaagttttcccttacataccttgggggccagatgtgaataacacagtttgtaccaatgaaagaggctggataacctaccagggattcctttcccagtggacgctcacgacttatttagatgtacagcggtgcctggaatatttgggctatctaggctattcaatattgactgagcaagagtctcaagcttcagctgttacagtgacaagagataaaaagatagacctgcagaaaaaacaaactcaaagaaatgtgttcagatgtaatgtaattggagtgaaaaactgtgggaaaagtggagttcttcaggctcttcttggaagaaacttaatgaggcagaagaaaattcgtgaagatcataaatcctactatgcgattaacactgtttatgtatatggacaagagaaatacttgttgttgcatgatatctcagaatcggaatttctaactgaagctgaaatcatttgtgatgttgtatgcctggtatatgatgtcagcaatcccaaatcctttgaatactgtgccaggatttttaagcaacactttatggacagcagaataccttgcttaatcgtagctgcaaagtcagacctgcatgaagttaaacaagaatacagtatttcacctactgatttctgcaggaaacacaaaatgcctccaccacaagccttcacttgcaatactgctgatgcccccagtaaggatatctttgttaaattgacaacaatggccatgtatccgtaagtacttgctgtcttcattttcatgttgcatggttcataacattgcatgccattattagccatgaagggaatatcttgtcacataggaatgttcagcaacagaaagatactttgtaatgagaaggtacaaatttgagtaaatgcaagtttggtttgaatgccataataaaatgatataaacagtgcttctgacaatatctgtatatttttgagcaggctgtaactatcttaatagaatagtacaataaaacacaaccccccacccagcattaaaaaatagttttactggaataaaatgggtttggcatcatgttgttttatgcttataaagcattttcatatgaacagaaagtttatatttttctgtttttgaccttaggtatatgaagttttctaaaatattttattaatttatgttgaaattgtgggtatgcttcagttaggatatgtcttttttaagtgctgtaaagagtagttgtaattggaatttctactgtataaatgttttacattaagtgttacgagccacaaatttcatgtacatttattatatatctatacatgcatatgcacaagcacataactgtggtcatctctgtagtttactaactgccttaaaattgcatggttttaatggcattcgcctcagtagtgtgtttgtataaattctgttttgtaacaaaatagtttttcaggcagtgcgtttctcaggactttatagcttawtctacttawtcttatgktagkctctaaattatttttcttcttatgaaaactacagtgtaacacagagtaataatcaaacattgctataaaccaagaatgacatttttcaaaaaggtgttgatttgtacagatttttaaagtcagttaactttactgctattttattacctaatactttttttagatgcaacaaacccttgaatttctatttgtattcgaagacaagtcattcctattattatagaataaccaaaaccttatttatgttttacctttgctttaaaactctcatgtawgttatctacagagaggatcattacagagacagactctcccgagacatgggccacactgatagaatagagaatttgagaaaaatctgggtctttctaaaaactgctttgtaagttactttttctttatgacttctgtgggattttgttgatattttcttagagaatgaccaaatctcctttcttgccataattaacatttagtaattatgtagaaacgcactgcttggtcaggcttcctgcctagctatatattacgttgtcttccttactacataaatgtacttctttaatcttgtgattacagtaactgcaagtgtgtttttacatctgsatttttaaaacattttactgtaattctgttgtgtgtgtgtgtgttatatgataaatgtacatacatggaccacttgtttatatggttaatcccaaactacttctcatgaagcatctccctgttgctaagcatmctttgcatctctcctttttggtgggtggagccttgtgtatgttaaagaatcagatttgatttataaaataacagatggattccagtatgacagctggcagagacttagtagcagtgatttgttcatcatcacaagtcaaaaaaaaaaannaaaaa

SEQ ID NO: 44 - DNA, 802 bp, Homo sapiens
  misc_feature (545): n equals a,t,g, or c
ccacaacggatgaagatgacagtgagtatgaggactgtccagaggaggaggaagacgactggcagacgtgctcagaagaagacggtcccaaggaagaggactgcagccaggactggaaggaaagctctactgcagattctgaggctcggagcaggaaaaccccacagaagaggcagatacacaattttagccatctggtatccaagcaggagttactggagctctttaaggagctacacactgggagaaaggtgaaagatgggcaacttacggtcggactggtgggctaccctaatgttggtaagagttcaacaatcaacaccatcatgggcaacaagaaagtatctgtgtctgccacacctggtcacacaaagcactttcagactctctatgtggagcctggcctctgcctgtgtgactgtcctggcttggtgatgccatcttttgtgtctaccaaggcagaaatgacttgcagcggaatcctcccaattgatcagatgagagatcatgttcctcctgtatcactaatatcctttctgctttgngaaacactctagttattacgtgcatattagggcttcaggtttattttgggcatttgagggattcagatttgatgaagaattgaaaaactagtgatttgcacaagtttatactgtgagatagcatgagaacttcagaatagaacctcatttcctgttttcagcagtgtagccttgaagaaagggagaatccaggtttcagatactcagttccaagttgcaaacctatttaacaatgccatgtaaccgtttgaatgacc

SEQ ID NO: 45 - DNA, 755 bp, Homo sapiens
gccggatgctacattgatttttgagattgaactttatgctgtgaccaaaggaccacggagcattgagacatttaaacaaatagacatggacaatgacaggcagctctctaaagccgagataaacctctacttgcaaagggaatttgaaaaagatgagaagccacgtgacaagtcatatcaggatgcagttttagaagatatttttaagaagaatgaccatgatggtgatggcttcatttctcccaaggaatacaatgtataccaacacgatgaactatagcatatttgtatttctactttttttttttagctatttactgtactttatgtataaaacaaagtcacttttctccaagttgtatttgctatttttcccctatgagaagatattttgatctccccaatacattgattttggtataataaatgtgaggctgttttgcaaacttaacttgcaggaatggtatgactgtgtttcctactgctttattctgtaaacaagaattgtagcaccatgaaacagacctctgggtcccagtgggcattttttcccctttcaggatgtaggaggacatgtatagtatgtcaaaaactgcagmttttcccaactttaaccttaccagcatgttaatatccagtttttttatagtttaaaagttaaagtgcctcatattttgaaaatatccattaaggacccaggaattagcatttcacttgtttatacatttttataacattatgaagacgatataaaa

SEQ ID NO: 46 - DNA, 732 bp, Homo sapiens
  misc_feature (583): n equals a,t,g, or c
  misc_feature (608): n equals a,t,g, or c
  misc_feature (620): n equals a,t,g, or c
  misc_feature (621): n equals a,t,g, or c
  misc_feature (673): n equals a,t,g, or c
  misc_feature (691): n equals a,t,g, or c
  misc_feature (706): n equals a,t,g, or c
cagctctaatacgactcactatagggaaagctggtacgcctgcaggtaccggtccggaattcccgggtcgacccacgcgtccgcacatgttggttcaaggtctagaaccaaacaccaaatacgaatttgccgttcgattacatgtggatcagctttccagtccttggagccctgtagtctaccattctactcttccagaagcaccagcaggcccaccagttggagtaaaagtgacattaatagaggatgacactgccctggtttcttggaaaccccctgatggcccagaaacagttgtgacccgctatactatcttatatgcatctaggaaggcctggattgcaggagagtggcaggtcttacaccgtgaagggscaataaccatggctttgctagaaaacttggtagcaggaaatgtgtacattgtcaagatatctgcatccaatgaggtgggagaaggacccttttcaaattctgtggagctggcagtacttccaaaggaaacctctgaatcaaatcagagcccaagcgtttagattctgctgatgccaaagtttattcaggatattaccatctggaccanaaatcaatgactggcattgctgtangtgttggcatanncttgacctgcatcctcatctgtgttctcatcttgatatacccgaagtaaagncaggaaatcatctgcttncaagacggcacacantggaactcaacagttaccttgtacca

SEQ ID NO: 47 - DNA, 803 bp, Homo sapiens
agatgtcatagacttaaaaaaaggagtggctcattttgaaaggattggaggagaatctgttggggatttgatgataaggaatattcagttacatcattcaggaatatctctgcacagtacaaacaaccctagaaagtttatctgcagtagccgatatcattgttagaggtccaccaggtcctcctgaggatgtgcaagtggaagacatttccagtactacttctcaactaagttggagagcaggcccagataataacagtcccattcaaatatttactattcagactcggacaccattttctgtgggttggcaggctgttgctacagttccagaaattctcaatggtaagacatacaatgcaacagtggttggtttgagtccttgggtggaatatgaatttcgtgttgttgccggcaacagcattgggattggagaaccaagtgaaccatcagaattgttaagaactaaagcatcagtccctgttgtggcaccagtaaacatccatggaggtggaggaagtcggtctgaactcgtcattacgtgggagtcaattccagaagaactgcagaatggggagggatttggatatatcatcatgttccggccagtgggctcgacaacctggtccaaggagaaagtgtcatctgtggaatcatcaaggtttgtctacagaaatgaaagcatcatcccactgtctccckggtgaagtcaaagtgggtgtgtataataatgaaggagaaggatccctgagtactgtgaccattgtctactctggggaagatgaacctcaactggccccaag

SEQ ID NO: 48 - DNA, 1586 bp, Homo sapiens
  misc_feature (13): n equals a,t,g, or c
  misc_feature (942): n equals a,t,g, or c
  misc_feature (1529): n equals a,t,g, or c
  misc_feature (1538): n equals a,t,g, or c
  misc_feature (1579): n equals a,t,g, or c
gggccccccctcngagtttttttttttttttttttttttttttttttttttttttttttttttccagtaataagatgtacttgaacaacaatattacttagtactgggtgtcttcaaaacaactagctaaatgttgcttatattataaacagcaagtccttcagataacttttgtcataaactggacctagctgtgagggaaatcattattgtactgatggctgacagcgtacatgcattcgaagtggaagcccywkatcctctcgcgtaggcatttgatatctttggaattcgaatttgttcactgctgctgccatctcctccgtcgctgaatggcttaatttctattatataatcttcatcgaaaggcaaagaaagctccaccgatgttttatttgtttcaatgacagatgtgctgctttgtctgttccatctgtacaagactttgtatccttttacttccgactcattatccagggccttcacttgatcccaattcaggataattttggagtctgatgaattccatatgatgtttccggggggttgacttggtggtggctttcgggttgtcacattgactgttgcactagaggggcctgtcccagcagaattatatgccttgacagctaagtgatacagcacactgccttttaagttcgtgatttttgttgatgtctgatttccaactgttcgtatttttctagcattttcttctttgtcttcatgtctccaatatttaacctcataaccttgtattcgtcctctattcttctccagtggggaggcccagaaaacttcaatatctgtggcagaaagacttctggcaaagatactggctggtggtttggtgggttcttcttctgcagaatacaccaccgtggtgggactgaaagggccttctcctttgttgttgaagacacctactttaacctcaaaggnagagaaggggtgcacgctctcattcctgaacacgtatctagaggcgtcagctgaggccagcactgtcagcatccagatcattttaccgtagggccggaaggccaccacataaccaaagccwcgaccattctgtaattcctcagggaccgtctcccaggttataaccagttcagatttgctgcctccgccaccactgacattcgctggtgtgacttcggggagagcttcttctgttctccgtttctctgaggggcggctgggctccccaatcccaatcacgttggctgcaactgtgcggaattcatattcaacccaagggttcaaacccaccacggtcgctgtgaatgtcttcccatcaatgagttctgggactgtactgactgcttgccagcccacggagaatggagtcctggcttgaatgacatacatggtgatggggctgtggttgtcaggcccgggtctccaggagagctgagcagtggtatctgtgatttcgtctattgtcacagcctctgggggacctggaggacctcttacaatcaggtctgcagcagcagatagcctgtccacctcgtgccgaattcctncagcccganggatccactagttctagagcggccgccaccgcggtggagcnccagctt

SEQ ID NO: 49 - DNA, 253 bp, Homo sapiens
  misc_feature (250): n equals a,t,g, or c
tttcgaaaaagctatttaggtgacactatagaaggtacgcctgcaggtaccggtccggaattcccgggtcgacccacgcgtccgaagtaataatgaccgcctataacatcatcggcgagagcccagccagcgcgcccgtggaggtctttgtcggcgaggctgccccggccatggccccgcagaacgtgcaggtgaccccactcacggccagccagctggaggtcacgtgggacccaccacccccggagancca

SEQ ID NO: 50 - DNA, 1023 bp, Homo sapiens
ggcttaaggccttgtttaaaagggaaaaaacaactgagtctttttagattaatcaaaaactatcctcttcctttggagaggagagagtgtttgtcacacgcggaatgaagtgccatgttctttgaggcacgatttgtatgccatttggaggagggagtccgttcaagagaatggattccctgacaagctacgtttgccagaatattccaagacatgttttagaagctacctatggcattaacatcataacgcctagagaggatgaagatccccaccgacctccaacatcggaagaactgttgacagcttatggatacatgcgaggattcatgacagcgcatggacagccagaccagcctcgatctgcgcgctacatcctgaaggactatgtcagtggtaagctgctgtactgccatcctcctcctggaagagatcctgtaacttttcagcatcaacaccagcgactcctagagaacaaaatgaacagtgatgaaataaaaatgcagctaggcagaaataaaaaagcaaagcagattgaaaatatcgttgacaaaacttttttccatcaagagaatgtgagggctttgaccaaaggagtccaggctgtgatgggttacaagcccgggagtggtgtagtgactgcatccactgcgagctctgagaacggggcggggaagccctggaaaaaacatggcaacagaaataaaaaagaaaaaagtcgtagactctacaagcacctggatatgtgaggttgggctgcaacagaaatgtcatctgcattgtgcagatggaaaagagcagaagctgcctgttgcctgtggaactgtcccaagacactagcactgtagaacgggccctgctcttgcagagcacggctgcacccaacagtctccatgtcaagaccaagggcctcctggaaacaccaactctgacaaaaaggagtcatctgggagcccgagaatcctactcctggccgggcacagtggcacgcaccaacatggagaaaccccgtctytactaaaa

SEQ ID NO: 51 - DNA, 2229 bp, Homo sapiens
ggcacgagcggaggaggagcgggcgccatggcggttctactggagaccactttaggcgacgtcgtcatcgacttgtacaccgaagaacggccgcgtgcctgcttgaatttcttgaaactgtgcaaaataaaatattacaattattgccttattcacaatgtacagagggattttatcatacaaactggcgatcctacagggactggccgtggaggagagtctatctttggccaactgtatggtgatcaagcaagcttttttgaggcagaaaaagtcccaagaattaagcacaagaagaaaggcacagtgtccatggtgaataatggcagtgatcaacatggatctcagtttcttatcaccacaggagaaaatctagattatcttgatggtgtccatacggtgtttggtgaggtgacagaaggcatggacataattaagaaaattaatgagacctttgttgacaaggactttgtaccatatcaggatatcaggataaatcatacggtgattttagatgatccatttgatgaccctcctgatttattaatccctgatcgatcaccagaacctacaagggaacaattagatagtggtcgaataggagcagatgaagaaattgatgatttcaaaggaagatcagctgaggaagtagaagaaataaaggcagaaaaagaggctaaaactcaggctatacttttggagatggtgggagacctacctgatgcagatattaaacctccagaaaatgtactgtttgtgtgtaaattgaacccagtgaccacagatgaggatctggaaataatattctctagatttgggccaataagaagttgtgaagttatccgagactggaagacaggagagtccctctgttacgcttttattgaatttgaaaaggaagaagattgtgagaaagcattcttcaaaatggacaatgtgcttatagatgacagaagaatacatgtggattttagccagtcggttgcaaaggttaaatggaarggaaaaggtgggaaatacaccaagagtgatttcaaggagtatgaaaaagaacaggataaaccacctaatttggttctgaaagataaagtaaagcccaaacaggatacaaaatacgatcttatattagatgagcaggccgaagactcaaaatcaagtcactcacacacaagtaaaaaacacaagaagaaaacccatcactgttctgaagagaaagaagatgaggactacatgccaatcaaaaatactaatcaggatatctatagagaaatggggtttggtcactatgaagaagaagaaagctgttgggagaaacaaaagagtgaaaagagagaccgaactcagaaccgaagtcgtagccgatctcgagagagggatggscattatagtaatagtcataaatcaaaataccaaacagatctttatgaaagagaaaggagtaaaaagagagaccgaagcagaagtccaaagaagtccaaagataaagaaaaatctaagtatagatgaaagatgaagaggcagaattgagaggctaacatatttactcttgtctaacttaagagtgccaggaaagcagatgcttagattttgtgtcaaagcttgttatttttttcatactaggattatggtctttagattaatactgattatatagagcacggaaagataaagaattgaacattttctttgtatacttttttacactaattttattgttatacataaatggtagtcttcatttttgaagtcttacattttcactctttttttaatgaagtatttcatactacaaaaatacataaacgtatatataaagggataataaatgtaaatatctgtgtactcatcagccagcttaagatacagatgttgtcgacattttagaagttccctaaggccctctccctctcaaataattatttggaattttgtgtttgtcatttgtctattatagttttacaacatacgtatgtatctgtaagtgaaatgttaattttgtatgtttctgaattttatataaatggcaaaatgtttacttctgtgactttctttcatttttattgctatatagtattatataaatatactacaacttattcattcttgatggacatttgagttttgtttatttgtttttgctgttgaaacaatgctgctgtgaacattgtatctagcagttatattgcttsatatattgataaaataatgccaaatttgtgttctgaaaaa

SEQ ID NO: 52 - DNA, 1304 bp, Homo sapiens
  misc_feature (21): n equals a,t,g, or c
  misc_feature (29): n equals a,t,g, or c
  misc_feature (31): n equals a,t,g, or c
tatcaagttttttcaagatanggaagatncntgaatattttaaggcaaaagaggaaccagctaataaagaaaataatgaagatgcttgagaggagagagagattggaccaattatcaggtcattaggatgctgtcctacggaaggagagctgcatgatctgattgcagaggtagaggaagaagaaccyactggatacattcgattcgaaaaatttcttccggtgatgacagaaatactactagaaagaaaatacagaccaattccagaagatgtccttcttcgagcttttgaggttttagattcagctaaacgtgggtttcttactaaggacgagctgatcaagtatatgactgaagaaggtgagcctttttctcaagaggaaatggaagaaatgttgtctgctgcaattgatccagaatcaaattcaattaattacaaggactatataacaatgatggtgatagatgaaaattaaatgttctaaagataatttctgattgaaagaacaattttagaaattgcttgttcttgttaatttcacatcttatcttaggattcctatatgtgatatttaataccttgtgacataactattttaagacactttgtttttaaagatgatcgtaacactttaaaccaaatttagtatgtctagccttacagaatgataaattactatttatttaaaaactattcttaaaacattttaacattagaatggattgttgtttattttctacaataaaactcaggtcaccttcgaattaattaagctgacaaaatgaaaatgacttaattacccaaggtttggcatgtaaagatcttaagagggkgcagaacgaaccactcgaaaacgagtagcagtgtaatgaaggcttcttttttaaacaataacaaatgcttcatcaatctgagtgtggaaggtgatttatcaaaataaatattactaattgatttttttatgagtgccaattacaaatatcatttgggataataataacttagtgtaaacatttatatttgctgatccagcatgtcaccatttatggagtagctaaaggagttgagatcattggaactagagaaaagaaggttgagtggaagttgatagtgtaaggtagtggcaattctccctttgtctttagaattctcacccactccgcatatctgtcatgggagcattgtcctgaatactgagtaagaatactgagaaatgttatggtgtgcaaatgtacagctcctgaaagagcaaaatgaagcacaagcagtcacaatggaacaatatatggcatggccactgaaa

SEQ ID NO: 53 - DNA, 719 bp, Homo sapiens
  misc_feature (661): n equals a,t,g, or c
  misc_feature (663): n equals a,t,g, or c
  misc_feature (685): n equals a,t,g, or c
  misc_feature (716): n equals a,t,g, or c
  misc_feature (718): n equals a,t,g, or c
acgccaccagggcagccgagcatttattacccgggcctccacccagcttggcagactttagacttgaggctggaggaaagggaactgaacgcggttctgggagcagcaagcccacgggtagcagccgaggccccagaatggccaagtttctttcccaagaccaaattaatgagtacaaggaatgcttctccctgtatgacaagcagcagagggggaagataaaagccaccgacctcatggtggccatgaggtgcctgggggcagcccgacgccaggggaggtgcagcggcactgcagacccacgggatagacggaaatggagagctggatttctccacttttctgaccattatgcacatgcaaataaaacaagaagacccaaagaaagaaattcttctagccatgttgatggtggacaaggagaagaaaggttacgtcatggcgtccgacctgcggtcaaaactcacgagtctgggggagaagctcacccacaaggaagtggatgatctcttcagggaagcagatatcgaacccaatggcaaagtgaagtatgatgaatttatccacaagatcacccttctggacgggactattgaaggaggagaatgggagagccttccctggcctgaaaacttggagcaattaattttttttaaaaagngntcttttacttgggagagatggnaacacagtggcaagacaacatttcccaactntng

SEQ ID NO: 54 - DNA, 1155 bp, Homo sapiens
tggaagggttcccttcctcctacaagatggtgtgtgaggagccttcaatacgacccggggtgtaaagtgtccaactctagtaggggcctgatggcatccccgccgagtcccaggagagagagagaagaccccttcctggagtccagggctcccgggaagaaacactggcatttgtmcctttgcttcggcttctggaggcagagactctgagcccagggagagccttctgcagccccatttcctcaaaaatccaacctgccaggtggcgggtcatgagctgtgctcagwrgctggaatctgaccytggkggcgtcgggcccagtctycatgggcarccgarcatttattacccgggcctycacccagcttggcagactttagacttgargctkgargaaagggaactgaacgcggttctgggagcagcaagcccacgggtagcagccgaggccccagaatgagtacaaggaatgcttctccctgtatgacaagcagcagagggggaagataaaagccaccgacctcatggtggccatgaggtgcctgggggccagcccgacgccaggggaggtgcagcggcacctgcagacccacgggatagacggaaatggagagctggatttctccacttttctgaccattatgcacatgcaaataaaacaagaagacccaaagaaagaaattcttctagccatgttgatggtggacaaggagaagaaaggttacgtcatggcgtccgacctgcggtcaaaactcacgagtctgggggagaagctcacccacaaggaagtggatgatctcttcagggaagcagatatcgaacccaatggcaaagtgaagtatgatgaatttatccacaagatcacccttcctggacgggactattgaaggaggagaatgggagagcctcccctgggcctgaaaacttggagcaattaattttttttaaaaagtgttcttttcacttgggagagatggcaaacacagtggcaagacaacattacccaactatagaagagaggctaactagcaacaataatagatgatttcagccatggtatgagtagatctttaataaaagatttgtattgattttattaaaaaaaaaaaaaaaaaaaaaaaaaaaaaaaaaaaaaaaaaaaaaaaaaaaaaaaa

SEQ ID NO: 55 - DNA, 1045 bp, Homo sapiens
  misc_feature (154): n equals a,t,g, or c
  misc_feature (978): n equals a,t,g, or c
ttttttttttttggcagcaagcctctcacttgttgtaggactgcaagacactggaccgaaagcctccaacacaaaccctagctgccaacctgctcatttcttaggttccactggtgagagcagctttaacacacaggcccaaggcactacggtncacctcacaggccagtaagaaacaggccctttaactggagattttaaaggttacaggttatagctttaactccttctgagacagcatccatttctcaagaggcctgagcaggaagctccgggagaaccaagcatgcggasstgctcagggacgtccactgggaagcctggtgtccactcccacctgcttgggccctgcaactggggtccctggagctggccaggctgtggggcgccagagagcacagcaccctagtgaccagcatggagcttctggaccgggtgagctgtcttgagcctcaaccacccaggtcaggaggtctgggaggccacatgcctccggccctccctacccggacaagttcagggcaaagtctcagccggggggtggccccgcaggacgtcgaggtccagcatcacggaacccagcagcccacggcggaaagtctgcaggaagtcacgggctgccgcaggatagttaggctgaataacgttcacgttacccgtgcccgtgagcaccttcaccttctgcgtcttccccagcttcacagccacactcttcagcacgcgctctacgttgtcacaggcactgcccaggccgtagtgctgcacgtacccaaagcgctggtgtttgttgagggtgtacagcaggtagtcagccatggtctcctccccgaccaggtggtccagcaccgttccacacagggccagcttcaggcctgtctccacactttcaatccgaggagccagcacgccaggagtgtccaacaggaacatcaggggccgctcagagacctgaattttggacatcacagctctggtgantcccaggctcgccacccaccctggtggctttccctgtaggaaaaggagaaaaggaggctcaaatgta

SEQ ID NO: 56 - DNA, 1220 bp, Homo sapiens
  misc_feature (205): n equals a,t,g, or c
gctgactaggacccctcccttctctcctgccctccctccagcccggggagtcccaggcagtgctgtgctgctgtttgaggtggagctggtgtcccgggaggatgggctgcccacaggctacctgtttgtgtggcacaaggaccctcctgccaacctgtttgaagacatggacctcaacaaggatggcgaggtccctccggagganttctccaccttcatcaaggctcaagtgagtgagggcaaaggacgcctcatgcctgggcaggaccctgagaaaaccataggagacatgttccagaaccaggaccgcaaccaggacggcaagatcacagtcgacgagctcaagctgaagtcagatgaggacgaggagcgggtccacgaggagctctgaggggcagggagcctggccaggcctgagacacagaggcccactgcgagggggacagtggcggtgggactgacctgctgacagtcaccctccctctgctgggatgaggtccaggagccaactaaaacaatggcagaggagacatctctggtgttcccaccaccctagatgaaaatccacagcacagacctctaccgtgtttctcttccatccctaaaccacttccttaaaatgtttggatttgcaaagccaatttggggcctgtggagcctggggttggatagggccatggctggtcccccaccatacctcccctccacatcactgacacagctgagcttgttatccatctccccaaactttctctttctttgtacttcttgtcatccccactcccagcccctattcctctatgtgacagctggctaggacccctctgccttcctccccaatcctgactggctcctagggaaggggaaggctcctggagggcagccctacctctcccatgccctttgccctcctccctcgcctccagtggaggctgagctgaccctgggctgctggaggccagactgggctgtagttagcttttcatccctaaagaaggctttccctaaggaaccatagaagagaggaagaaaacaaagggcatgtgtgagggaagctgcttgggtgggtgttagggctatgaaatcttggatttggggctgaggggtgggagggagggcagagctctgcacactcaaaggctaaactggtgtcagtccttttttcctttgttccaaataaaagattaaaccaaaaaaaaaaaaaaaaacctcgggggggg

SEQ ID NO: 57 - DNA, 1500 bp, Homo sapiens
cggaagcccgcagtgccggaggcccgcagcgccggaacctcagaggcgggtcgcagcggcgcagaggaggtcagctgcgggagcgtttccggggacggtgccgccatgagattgaccccgcgcgcgctgtgcagcgccgcccaggccgcctggcgggagaacttccccctgtgcggtcgcgacgtggcgcgctggttcccgggccacatggccaaggggctgaagaagatgcagagcagcctgaagctggtggactgtatcatcgaggtccacgatgcccggatcccactttcaggccgcaaccctctgtttcaggaaacccttgggcttaagcctcacttgctggtcctcaacaagatggacttggcggatcttacagagcagcagaaaattatgcaacacttagaaggagaaggcctaaaaaatgtcatttttaccaactgtgtaaaggatgaaaatgtcaagcagatcatcccgatggtcactgaactgattgggagaagccaccgctaccaccgaaaagagaacctggagtactgtatcatggtcattggggtccccaacgtgggcaagtcctccctcatcaactccctccggaggcagcacctcaggaaagggaaagccaccagggtgggtggcgagcctgggatcaccagagctgtgatgtccaaaattcaggtctctgagcggcccctgatgttcctgttggacactcctggcgtgctggctcctcggattgaaagtgtggagacaggcctgaagctggccctgtgtggaacggtgctggaccacctggtcggggaggagaccatggctgactacctgctgtacaccctcaacaaacaccagcgctttgggtacgtgcagcactacggcctgggcagtgcctgtgacaacgtagagcgcgtgctgaagagtgtggctgtgaagctggggaagacgcagaaggtgaaggtgctcacgggcacgggtaacgtgaacgttattcagcctaactatcctgcggcagcccgtgacttcctgcagactttccgccgtgggctgctgggttccgtgatgctggacctcgacgtcctgcggggccaccccccggctgagactttgccctgaacttgtccgggtagggagggccggaggcatgtggcctcccagacctcctgacctgggtggttgaggctcaagacagctcacccggtccagaagctccatgctggtcactagggtgctgtgctctctggcgccccacagcctggccagctccagggaccccagttgcagggcccaagcaggtgggagtggacaccaggcttcccagtggacgtccctgagcagctccgcatgcttggttctcccggagcttcctgctcaggcctcttgagaaatggatgctgtctcagaaggagttaaagctataacctgtaacctttaaaatctccagttaaagggcctgtttcttactggcctgtgaggtgcaamaaaaaaaaaaaaaacaacaaaaaa

SEQ ID NO: 58 - DNA, 1639 bp, Homo sapiens
gcggccgccctttttttttttttttttttttttttttaaggaaatgcatggtattcttgctgcattcttaagttacctctcggtaaatgctgaggaaacattctcaggctcatcatacccatattcacccagatgttagactgctgtgtccgagtggcaggctgctgtctcaggaagagaagatagcggggaaataattccagctctgggatgtctgtcttgctgttcttgataactggtctaggtaaggccaggtttgctccataccagtgataaagtgctctccacacaggttctgggaccatttcatagtctcttccatgaatcagctgtggagttcgttttaatcgtcctccttctagtgttaatgatgtagcctttactggttcttgagttactaatggctgattatcaatagcccctggtttctgagggttaaggtgcaacaaaatattcccattggctcccagcaaacactggttgttattgtcagaagtgttatgttgtcgagcaaagcaaacatctgcccctggtgtggcagaatacagaaagccgctgccagcagtttctgaggcttcagatgcagtagaaatgttgtctgaaaatttctcttctgtagtattcacgtarctgaggctgcttccaattctatcttcgacctgctccataggatgggctgcagttccaaatgagtattttcctccattcaaamcagatgatggctcaattaccacagggttggcatcgtatttgacatattctttccactgttgccaccactgcatggagatgataaaccagttgtgtcctgcttgcagaccatacctgctctctcgttctaaccatcctctaataatttgtccttcttcttccggagtagctggtcttaaccccagaactatgtgacacacctggaaaaggaggttcaaaaactcattggcaagaacatttttcacactccagatctgatagtcttccagagtaagatgacccatctttgtggtgtcatgkgcatycagtatgcyttctmcaatwtcagagagwtccatatgtaatycaggawtatcatcagtgcggttgtccttccagacttctaaaagtgcaaccaccatgtctctcagttcaacccctgragagaactccatcacggtcaacatcaaataccttgaagcaaaatttttgtctttcagccaggggtcccctgcaacaggctgataacccacaggatatctccttaaaatctatgtgattgtcacgattttcatcaaaagcattaaacaaaccttcacttagagatggacgaataggtggtgaaaccaatgggccaaatgtctctaaatcaaatcgtccagtccgggattgagccttcaataaccaatagcgtttctcaagatcaatgatgtctgattcctccaaatgtgtgactccagccagagtttggtagaaagtaggagtatcactatcatcagtgagggtaacatacacacctccagatagaagccatcgagagaaagtaaaagcatctttgtttagaaaaagccaatttctaaacttttcatagtttaccttttcaccctctgagaaacacttcctgagtgtatctgggactttaccatccaccacgtggagcattctttcc

SEQ ID NO: 59 - DNA, 822 bp, Homo sapiens
gggctgcaggccgctgagttccgccagcagcccgacgctggcaccgccatcaagtttatttaacatatttaataacattagaccgcgggttaagccgcgcacggttttgtattccgtctgctcattgttctgcatattaattgacatttctatagttaaaacaacgtggtgcacctggtgcacattcgggcatgttttgattgtagccgaaaacacccttcctatactgagcgcacaataaaaaatcatttacatgtttttaacaaaataagttgcgctgtactgtgcgcgcaacgacattttgtccgagtcgtgaggtactgaaatggcaatacaacaccctgacatccagcctgctgttaaccatagcgttcaggtggcgatcgctggtgccggcccggttgggctgatgatggcgaactatctcggccagatgggcattgacgtgctggtggtggagaaactcgataagttgatcgactacccgcgtgcgattggtattgatgacgaggcgctgcgcaccatgcagtcggtcggcctggtcgatgatgttctgccgcacactacgccgtggcacgcgatgcgttttctcacccvgaaaggccgctgttttgctgatattcagccaatgaccgatgaatttggctggccgcgccgtaacgcctttattcagccgcaggtcgatgcggtgatgctggaaggggtgtcgcgttttccgaatgtgcgctgcttgttttcccgcgagctggaggccttcagtcagcaagatgacgaagtgaccttgcacctgaaaacggcagaagggcagcgggcccggtaccc

SEQ ID NO: 60 - DNA, 1038 bp, Homo sapiens
gacctgacgaggccatggaggacggcgaggagggctcggacgacgaggccgagtgggtggtgaccaargacaagtccaaatacgacgagatcttctacaacctggcgcctgccgacggcaagctgagcggctccaaggccaagacctggatggtggggaccaagctccccaactcagtgctggggcgcatctggaagctcarcgatgtggaccgcgacggcatgctggatgatgaagagttcgcgctgccagctgtaaggaccgggggtctccctcctcactaccgccagacaccccggtggaagcatttagaggggaccacgggagggacaaggcttctctgtccgcccttcacacctccagcctcacgttcacttaggcacatcacacacacactggcacacgcaggcatccatccatccgtcattcattcaaatatttattgagcacctactatgtgcccagccctgttctaggcactgggcattaccatagagaacaaaatagacaaatacatctgccctcatggaaggtgacgttcccaggagagggcacctacacagtcacgcaaacacacactaattcctggcagggcccccagcccctcccctggctgagcagccctgtggctgaaatgactagcagataaacagacccccttctgctccgcttcctcctgcccagccaggcaacaccctcaaccggctccatcacatcctcaggtctcgggaccatggggggctcagaggggagacacacctactgcttcctcagatgggcccctccgcagccccttcccttgctcggggaaagcccccaattctgcccacacccatttatttccttccttccttccttcttttctttccttccttccttcttttttgtttttgcccccaattctgcccatacccatttctttctttccttccttccttcttttttgtttttgcccccagttctgtccacaccccttccctttcctgtcctgtcctttctttctttcttttttgayagagcaagactccgtctcaaaaa

SEQ ID NO: 61 - DNA, 590 bp, Homo sapiens
  misc_feature (495): n equals a,t,g, or c
  misc_feature (580): n equals a,t,g, or c
  misc_feature (582): n equals a,t,g, or c
  misc_feature (587): n equals a,t,g, or c
gcggccgcccttttttttttttttttttttttttttttgcctctatgaagagtgtaaggtgtatttcaaagcatagttccagtatcaaaaattgtcttgcattttctcatcagcaggtcagtttgagaaagcacgaacaaagttatagtagttaattttgccttctccatgagagcacatcctgattaactccttaaccaaggagtcatccactgggacgttaagcgattcacagattttaaagaacatgtctctgtccacatatcctgaagcttccttgtcataaatttgaaatgcctcacgaatgttgtctttgcatgagtgatctttcagttgcttctgaattgtgtctattaatgcttccaattcctgcacgcctggatccttttcagtttgcttgctttctgcttctggagcaggcgcttctcgctttcggacatggttctgaattgacgcgagtgcttctggtgaatactgggcagcgcccamgcgtcngcggacgcgtgggtcgacccgggaattccggaccggtacctgcaggcgtaccttctatagtgtcacctggataggcccaaacaanantgagntac

SEQ ID NO: 62 - DNA, 1346 bp, Homo sapiens
gggatgatacagacagcatgtatggtgaatgtcggacctacatcattcattactatcttatggatgatacggtggaaattcgagaggtccacgaacggaatgatgggagagatcctttcccactcctaatgaaccgccagcgtgtgcccaaagttttggtggaaaatgcaaagaacttccctcagtgtgtgctagaaatctctgaccaagaagtgttggaatggtatactgctaaagacttcattgttgggaagtcactcactatccttgggagaactttcttcatttatgattgtgatccatttactcgacggtattacaaagagaagtttggaatcactgatttaccacgtattgatgtgagcaagcgggaaccacctccagtaaaacaggagttgcctccttataacggttttggactagtggaagattctgctcagaattgttttgctctcatccaaagctccaaaaaaagagttattaaaagctggtgaatgataacaaggtgcttcgttatttggctgtactgctaccgacatgatcagtatctttgagcctcctgttcgcaattctggtatcattgggggcaagtaccttggcaggactaaagttgttaaaccatactctacagtggacaaccctgtctactatggccccagtgacttcttcattggtgctgtgattgaagtgtttggtcaccggttcatcatccttgatacagacgagtatgttttgaaatacatggagagcaacgctgcccagtattcaccagaagcactcgcgtcaattcagaaccatgtccgaaagcgagaagcgcctgctccagaagcagaaagtctatcatgaacccttgtgaaatgaaatatttgaagacacagatatgaagggaccaaggaaaagctttgttcctaccccatctttcatgtacccacttcttaccctccactccccatagcaagcaaactgaaaaggatccaggcgtgcaggaattggaagcattaatagacacaattcagaagcaactgaaagatcactcatgcaaagacaacattcgtgaggcatttcaaatttatgacaaggaagcttcaggatatgtggacagagacatgttctttaaaatctgtgaatcgcttaacgtcccagtggatgactccttggttaaggagttaatcaggatgtgctctcatggagaaggcaaaattaactaytataactttgttcgtgctttctcaaactgacctgctgatgagaaaatgcaagacaatttttgatactggaactatgctttsmaatacmccttacactcttcatagaggcaaaaaaaaaaaaaaaaaaagggcggccgc

SEQ ID NO: 63 - DNA, 920 bp, Homo sapiens
gggcagaactgtctgggacagacgctgcccggatccctgcggctgcctgcactctggaccacgagctctgagagcagcaggttgagggccggtgggcagcagctcggaggctccgcgaggtgcaggagacgcaggcatggccggtgagctgactcctgaggaggaggcccagtacaaaaaggctttctccgcggttgacacggatggaaacggcaccatcaatgcccaggagctgggcgcggcgctgaaggccacgggcaagaacctctcggaggcccagctaaggaaactcatctccgaggttgacrgcgacggcgacggcgaaatcagcttccaggagttcctgacggcggcgaagaaggccagggccggcctggaggacctgcaggtcgccttccgcgccttcgaccaggatggcgacggccacatcaccgtggacgagctcaggcgggccatggcggggctggggcagccgctgccgcaggaggagctggacgccatgatccgcgaggccgacgtggaccaggacgggcgggtgaactacgaggagttcgcgaggatgctcgcccaggagtgaggctccccgcctgtgtccccctggctgcgctctgagccttcagggccaccgcccgctgctgcttttgtgctgggactctccggggaaacctggtcggtggatgggaaactgcctccccctgggaggaaggctttgcgctccggggcctggatgcggcgccctcgggccgcctgcgagcccctctctgcctccagaccttgggcagaaggaggcctccttgggcctggtccccctttgccctgcagtggaatgagggcccctcagccccgcattgatctaaataaaggactgccgagttcaaaaaaaaaaaaaaaaaaaaaaaaaaaaaaaaaaaaaaaaaaaa

SEQ ID NO: 64 - DNA, 1084 bp, Homo sapiens
  misc_feature (989): n equals a,t,g, or c
  misc_feature (1014): n equals a,t,g, or c
  misc_feature (1032): n equals a,t,g, or c
  misc_feature (1059): n equals a,t,g, or c
  misc_feature (1066): n equals a,t,g, or c
gaaagatggcggcggctgcgggtagctgcgcgcgggtggcggcctggggcggaaaactgcgacgggggctcgctgtcagccgacaggctgtgcggagtcccggccccttggcagcggcagtggccggcgcggccctggcaggagcaggagcggcctggcaccacagccgcgtcagtgttgcggcgcgggatggcagttttacagtctccgcacagaaaaatgttgaacatggaataatatatattgggaaaccgtctcttcgtaagcagcgcttcatgcagttttcttcactcgaacatgaaggagaatattatatgacaccacgagacttcctcttctcagtgatgtttgagcaaatggaacgtaaaacttcagtcaagaagctgacaaaaaaggacatcgaggatacactgtcagggatccaaacagctggctgtggatcaacttttttcagagaccttggcgataaagggctaatttcatataccgagtatcttttcttgcttacaatcctcactaaaccccattctggatttcatgttgcttttaaaatgctggatacagatggtaatgagatgattgaaaaaagggaattttttaagctgcagaagatcataagtaaacaagatgacttgatgacagtgaaaactaatgaaactggatatcaggaagcaatagtgaaagaacctgaaattaacacaactcttcagatgcgtttctttggaaaaagaggacaaagaaaacttcattataaagaatttcgaagatttatggaaaatttacaaacagagattcaagaaatggaattccttcagttttctaaaggtttgagtttcatgagaaaagaagactttgcagagtggctactttttttcactaacactgaaaataaaggtatttattgggaaaaatgtgagrgrggaagttgtcagcaggggagggccttagtttggggtggattccagtccttttgcccttttaccacccgntgggagactttgctattgccctgcnggtgttccgtttagctcntctcccgttccgactggccgggttttngggggcngtggaagtggccaccggg

SEQ ID NO: 65 - DNA, 1452 bp, Homo sapiens
  misc_feature (1334): n equals a,t,g, or c
  misc_feature (1365): n equals a,t,g, or c
  misc_feature (1394): n equals a,t,g, or c
  misc_feature (1433): n equals a,t,g, or c
  misc_feature (1442): n equals a,t,g, or c
gcagatctggtaccaaaggagaatttggagagctggctaaattatttgaagaaagaattgccaacagtggtgttcagagcctcaacaaaaccaaaggataaagggaagataaccaaggtatcctttattagtggtaagaaatgtgattctttcagattttggttgaaatatgatgagtgtacaaaatcttgatttaagtgaatgaaaaattacaagatccaactctgatttcagccagagatcatctgaaaggcaatgtagttatcttaagagctgggctctggagcctgattgcttggggtttgttgaaatttatcaggtaagttgccagaataattcaactatttggaattttagcgtgtgaaggcaaagaagaatgctgctccattcagaagtgaagtctgctttgggaaagagggcctttggaaacttcttggaggttttcaggaaacttgcagcaaagccattcgggttggagtaattggtttcccaaatgtggggaaaagcagcattatcaatagcttaaaacaagaacagatgtgtaatgttggtgtatccatggggcttacaaggagcatgcaagttgtccccttggacaaacagatcacaatcatagatagtccgagcttcatcgtatctycacttaattcctcctctgcgcttgctctgcgaagtccagcaagtattgaagtagtaaaaccgatggaggctgccagtgccatcctttcccaggctgatgctcgacaggtagtactgaaatatactgtcccaggctacaggaattctctggaattttttactrtgcttgctcagagaagaggtatgcaccaaaaaggtggaatcccaaatgttgaaggtgctgccaaactgctgtggtctgagtggacagggtaagctttcttttctgttggcattttggtgaccactagaataaaccttcttttgacacatcttatttttaatatcagtgcctcattagcttactattgccatccccctacatcttggactcctcctccatattttaatgagagtattgtggtagacatgaaaagcggcttcaatctggaagaactggaaaagaacaatgcacagagcataagagccatcaagggccctcattkggccatagcatccttttccagkcttccggkctgacaaatggaataatagaagaaaaggacmtacmtgaagaattgccaaaacggaaagaaaggaagcaggargaragggaggatgacaaagacagtgaccaggaaactgttgatgaagaagttgatgaaaacagctcaggcatgtttgctgcagaagagacaggggaggcactgtctgangagactacagcaggtgaacagtctacaaggncttttatcttggataaaatcattgaagangatgatgcttatgacttcagtacagattatgtgtaacanaacaatggntttttatgaa

SEQ ID NO: 66 - DNA, 1287 bp, Homo sapiens
  misc_feature (549): n equals a,t,g, or c
  misc_feature (1284): n equals a,t,g, or c
  misc_feature (1287): n equals a,t,g, or c
ggggcgcccgggagtgggtgcgcgggaggcgagtgagccgggcgccgggccctgggggctcggcgggacggggagtcagggctgccaggcgcccagctgtgcccagatggatgggacagagacccggcagcggaggctggacagctgtggcaagccaggggagctggggcttcctcaccccctcagcacaggaggactccctgtagcctcagaagatggagctctcagggcccctgagagccaaagcgtgacccccaagccactggagactgagcctagcagggagaccgcctggtccataggccttcaggtgaccgtgcccttcatgtttgcaggcctgggactgtcctgggccggcatgcttctggactatttccagcactggcctgtgtttgtggaggtgaaagaccttttgacattggtgccgcccctggtgggcctgaaggggaacctggagatgacactggcatccagactctccacagctgccaacactggacaaattgatgacccccaggagcagcacagagtcatcagcagcaacctggncctcatccaggtgcaggccactgtcgtgggggctcttggctgctgtggctgcgctgctgttgggcgtggtgtctcgagaggaagtggatgtcgccaaggtggagttgctgtgtgccagcagtgtcctcactgccttccttgcagcctttgccctgggggtgctgatggtctgtatagtgattggtgctcgaaagctcggggtcaacccagacaacattgccacgcccattgcagccagcctgggagacctcatcacactgtccattctggctttggttagcagcttcttctacagacacaaagatagtcggtatctgacgccgctggtctgcctcagctttgcggctctgaccccagtgtgggtcctcattgccaagcagagcccacccatcgtgaagatcctgaagtttggctggttcccaatcatcctggccatggtcatcagcagtttcggaggactcatcttgagcaaaaccgtttctaaacagcagtacaaaggcatggcgatatttacccccgtcatatgtggtgttggtggcaatctggtggccattcagaccagccgaatctcaacctacctgcacatgtggagtgcacctggcgtcctgcccctccagatgaagaaattctggcccaacccgtgttctactttctgcacgtcagaaatcaattccatgtcagctcgagtcctgctcttgctggtggtcccaggccatctgattttcttctacctcnatn

SEQ ID NO: 67 - DNA, 1436 bp, Homo sapiens
gggtcgacccacgcgtccgcagcgccggaacctcagaggcgggtcgcagcggcgcagaggaggtcagctgcgggagcgtttccggggacggtgccgccatgagattgaccccgcgcgcgctgtgcagcgccgcccaggccgcctggcgggagaacttccccctgtgcggtcgcgacgtggcgcgctggttcccgggccacatggccaaggggctgaagaagatgcagagcagcctgaagctggtggactgtatcatcgaggtccacgatgcccggatcccactttcaggccgcaaccctctgtttcaggaaacccttgggcttaagcctcacttgctggtcctcaacaagatggacttggcggatcttacagagcagcagaaaattatgcaacacttagaaggagaaggcctaaaaaatgtcatttttaccaactgtgtaaaggatgaaaatgtcaagcagatcatcccgatggtcactgaactgattgggagaagccaccgctaccaccgaaaagagaacctggagtactgtatcatggtcattggggtccccaacgtgggcaagtcctccctcatcaactccctccggaggcagcacctcaggaaagggaaagccaccagggtgggtggcgagcctgggatcaccagagctgtgatgtccaaaattcaggtctctgagcggcccctgatgttcctgttggacactcctggcgtgctggctcctcggattgaaagtgtggagacaggcctgaagctggccctgtgtggaacggtgctggaccacctggtcggggaggagaccatggctgactacctgctgtacaccctcaacaaacaccagcgctttgggtacgtgcagcactacggcctgggcagtgcctgtgacaacgtagagcgcgtgctgaagagtgtggctgtgaagctggggaagacgcagaaggtgaaggtgctcacgggcacgggtaacgtgaacgttattcagcctaactatcctgcggcagcccgtgacttcctgcagactttccgccgtgggctgctgggttccgtgatgctggacctcgacgtcctgcggggccaccccccggctgagactttgccctgaacttgtccgggtagggagggccggaggcatgtggcctcccagacctcctgacctgggtggttgaggctcaagacagctcacccggtccagaagctccatgctggtcactagggtgctgtgctctctggcgccccacagcctggccagctccagggaccccagttgcagggcccaagcaggtgggagtggacaccaggcttcccagtggacgtccctgagcagctccgcatgcttggttctcccggagcttcctgctcaggcctcttgagaaatggatgctgtctcagaaggagttaaagctataacctgtaacctttaaaaaaaaaaaaaaaa

SEQ ID NO: 68 - DNA, 475 bp, Homo sapiens
  misc_feature (357): n equals a,t,g, or c
  misc_feature (362): n equals a,t,g, or c
  misc_feature (448): n equals a,t,g, or c
  misc_feature (455): n equals a,t,g, or c
  misc_feature (467): n equals a,t,g, or c
gaaatcagcctcttgccccattgctctttgcaggggtagaagaaggaagtgtagcggggtaaggaatgcaccgtcaggtctctcacaaccctttcccagctctcctccccaacaaacagtacctgggatggagccctagggtaatcgcagccacgggatgggtcgaggtgacaggcttcagggaccacacttcggcctttgcccgaccttccacaacttaagcgaagagaggccaccagccgtaacagggcgttaaagcccaggggaagattggtccttatgacttcctgccttccagccctcagattcatcgctaccccgaggctaagcgccatgcctcatattgacaacgatgtngaaantgggayttcaaggrtgtccttttgaggcccaaacgcagtacccttaagtctcgaagtgaggtggatctacaagatccttttatttnggaactnaaagcagacatnctttgggg

SEQ ID NO: 69 - DNA, 1325 bp, Homo sapiens
gcggccgccgaggatggggaaatccaacagcaagttgaagcccgaagttgtggaggagctgaccaggaagacctactttaccgagaaggaggtccagcagtggtacaaaggcttcatcaaggactgccccagtgggcagctggatgcggcaggcttccagaagatctacaagcaattcttcccgttcggagaccccaccaagtttgccacatttgttttcaacgtctttgatgaaaacaaggacgggcgaattgagttctccgagttcatccaggcgctgtcggtgacctcacggggaaccctggatgagaagctacggtgggccttcaagctctacgacttggacaatgatggctacatcaccaggaatgagatgctggacattgtggatgccatttaccagatggtggggaataccgtggagctcccagaggaggagaacactcctgagaagagggtggaccggatctttgccatgatggataagaatgccgacgggaagctgaccctgcaggagttccaggagggttccaaggcagacccgtccattgtgcaggcgctgtccctctacgacgggctggtatagtcccaggctggagctggatgcctgggaaccactcacctccttctgtgccatgaggccacctcagccctgacaccaaccccgtgcgtccacccagccttcttccgcatccacacacagccggctgcccttgacccgggaggccccggctctcctctcccctgtcctgcacccatcccccgcctgaagccaccggctccaattgccagcaacctctgcttgtccggaaaacgacaacacgaaatggaaaaggctacagccctctgcataaaccaaggacttggctgcctcgcaggcagcctccgttcctcccgctctcttgcgcgtgtgcttttgttttttattttgaacagacgttttaaaagaaaaaaaaacaactaccttctgtcctagaagacacagactgacagatggggtgaaggcctggggacctcagagaactctgccttgccctcgtccctcgtccttcggcagccggagaggctgtgggtgggccgagggtgtctaggggttctgcctrgtcaacgttatttgtcgtcccatcttttggcagcaaaaccacctgcgtggctaggatgattaattatgaggatgatgattttttttgtgataacagtattgtgctttttgtggggaaagtgaggttttttttttatatacatatataattgatatctttaatttattggttgttaactgttgctgctgcctggtgtgtcctcagctcccaggctgcgggccc

SEQ ID NO: 70 - DNA, 1580 bp, Homo sapiens
cccgcagcagctcccaggatgaactggttgcagtggctgctgctgctgcgggggcgctgagaggacacgagctctatgcctttccggctgctcatcccgctcggcctcctgtgcgcgctgctgcctcagcaccatggtgcgccaggtcccgacggctccgcgccagatcccgcccactacagggagcgagtcaaggccatgttctaccacgcctacgacagctacctggagaatgcctttcccttcgatgagctgcgacctctcacctgtgacgggcacgacacctggggcagtttttctctgactctaattgatgcactggacaccttgctgattttggggaatgtctcagaattccaaagagtggttgaagtgctccaggacagcgtggactttgatattgatgtgaacgcctctgtgtttgaaacaaacattcgagtggtaggaggactcctgtctgctcatctgctctccaagaaggctggggtggaagtagaggctggatggccctgttccgggcctctcctgagaatggctgaggaggcggcccgaaaactcctcccagagtataacaaagccatccggaactacacccgcttcgatgactggtacctgtgggttcagatgtacaaggggactgtgtccatgccagtcttccagtccttggaggcctactggcctggtcttcagagcctcattggagacattgacaatgccatgaggaccttcctcaactactacactgtatggaagcagtttggggggctcccggaattctacaacattcctcagggatacacagtggagaagcgagagggctacccacttcggccagaacttattgaaagcgcaatgtacctctaccgtgccacgggggatcccaccctcctagaactcggaagagatgctgtggaatccattgaaaaaatcagcaaggtggagtgcggatttgcaacaatcaaagatctgcgagaccacaagctggacaaccgcatggagtcgttcttcctggccgagactgtgaaatacctctacctcctgtttgacccaaccaacttcatccacaacaatgggtccaccttcgacgcggtgatcaccccctatggggagtgcatcctgggggctggggggtacatcttcaacacagaagctcaccccatcgaccctgccgccctgcactgctgccagaggctgaaggaagagcagtgggaggtggaggacttgatgagggaattctactctctcaaacggagcaggtcgaaatttcagaaaaacactgttagttcggggccatgggaacctccagcaaggccaggaacactcttctcaccagaaaaccatgaccaggcaagggagaggaagcctgccaaacagaaggtcccacttctcagctgccccagtcagcccttcacctccaagttggcattactgggacaggttttcctagactcctcataaccactggataatttttttatttttatttttttgaggctaaactataataaattgcttttggctatcaaaaaaaaaaaaaaaaaaaaaaaaaaaaaaaaaaaaaaaaaaaaaaaaaaaaggaa

SEQ ID NO: 71 - DNA, 485 bp, Homo sapiens
ccacccgtgaagaaccagcagggccaggacattgacgacaactgggtgaaagacagaaaaaaggagtttgaggagctcattgactccaaccacgacggcatcgtgaccgccgaggagctggagagctacatggaccccatgaacgagtacaacgcgctgaacgaaatctcgcttcagtcactctgccgaaggcgctgacggcatcgcggccggaacctctgggcmcggcccctcccagggccgccgctccgtgggaaaaaacagctcctccatttccttgaaaactgaacgattattaaaaatagattaaacttcgctggaaatgagtagccaggaagttcaggggagggtgccgggtccttcccgggcctggcgtgtcggagccacccaggtcccgcwgctgccgctgagaaaatgcaaatatttgttgtgacaagaatcacatacatttactttaaatataggtgccttttttggcaaaaaaa

SEQ ID NO: 72 - DNA, 637 bp, Homo sapiens
  misc_feature (539): n equals a,t,g, or c
  misc_feature (597): n equals a,t,g, or c
ggagcagcctccctgccacctgccagtccctactcagtgccgcccatccctgtgctgctgtgcctgctcagagccatctggctccctgggatttgagtctgctgtttctcctctctctctctgcaggggtgctgatggtctgtatagtgattggtgctcgaaagctcggggtcaacccagacaacattgccacgcccattgcagccagcctgggagacctcatcacactgtccattctggctttggttagcagcttcttctacagacacaaagatagtcggtatctgacgccgctggtctgcctcagctttgcggctctgaccccagtgtgggtcctcattgccaagcagagcccacccatcgtgaagatcctgaagtttggctggttcccaatcatcctggccatggtcatcagcagtttcggaggactcatcttgagcaaaaccgtttctaaacagcagtacaaaggcatggcgatatttacccccgtcatatgtggtgttggtggcaatctggtggccattcagaccagccgaatntcaacctacctgcacatgtggagtgtacctggcgtcctgcccctccagatgaagaaantctggcccaacccgtgttctactttctgcacgtcagaaat

SEQ ID NO: 73 - DNA, 1915 bp, Homo sapiens
ccccccgggctgcaggaattcggcacgagcagccataccctagaggagcgggtggtgcactggtacttcaaactactggataaaaactccagtggagacatcggcaaaaaggaaatcaaacccttcaagaggttccttcgcaaaaaatcaaagcccaaaaaatgtgtgaagaagtttgttgaatactgtgacgtgaataatgacaaatccatctccgtacaagaactgatgggctgcctgggcgtggcgaaagaggacggcaaagcggacaccaagaaacgccacacccccagaggtcatgctgaaagtacgtctaatagacagccaaggaaacaaggataaatggctcataccccgaaggcagttcctagacacatgggaaatttccctcaccaaagagcaattaagaaaacaaaaacagaaacacatagtatttgcactttgtactttaaatgtaaattcactttgtagaaatgagctatttaaacagactgttttaatctgtgaaaatggagagctggcttcagaaaattaatcacatacaatgtatgtgtcctcttttgaccttggaaatctgtatgtggtggagaagtatttgaatgcatttaggcttaatttcttcgccttccacatgttaacagtagagctctatgcactccggctgcaatcgtatggctttctctaacccctgcagtcacttccagatgcctgtgcttacagcattgtggaatcatgttggaagctccacatgtccatggaagtttgtgatgtacggccgaccctacaggcagttaacatgcatgggctggtttgtttcttgggattttctgttagtttgtcttgttttgctttccagagatcttgctcatacaatgaatcacgcaaccactaaagctatccagttaagtgcaggtagttcccctggaagaaataatattttcaaactgtcgttggtgtgatactttggctcaaaggatctttgcttttccattttaagcttctgttttgagttttgccctggggcttgaatgagtcccagagagtcgttcggatggtgggaggctgcctaggaggcagtaaatccagtcacagtgcctgggaggggcccatccttccaaaatgtaaatccagtcgcggtgtgaccgagctggctaacaggcttgtctgcctggttttcttcctacacgtggacattattctcctgatcctcctacctggtccaccccagggctaccggaaggtaaaatcttcacctgaaccaattatgagcagtctccttactgaaggtacagccggatacgtggtgcccccggggctggtgttggcagccggggggaggtgcctgagggtccccacggttcctttctgcttttctgaatgcatcaagggtacgagaacttgccaatgggaaattcatccgagtggcactggcagagaaggataggagtggaatgcccacacagtgaccaacagaactggtctgcgtgcataaccagctgccaccctcaggcctgggccccagagctcagggcacccagtgtcttaaggaaccatttggaggacagtctgagagcaggaacttcaagctgtgattctatctcggctcagacttttggttggaaaaagatcttcatggccccaaatcccctgagacatgccttgtagaatgattttgtgatgttgtgatgcttgtggagcatcgcgtaaaggcttcttgcttatttaaactgtgcaaggtaaaaatcaagcctttggagccacagaaccagctcaagtacatgccaatgttgtttaagaaacagttatgatcctaaactttttggataatcttttatatttctgacctttgaatttaatcattgttcttagattaaaataaaatatgctattgaaactaaaaaaaaaaaaaaaaaaa

SEQ ID NO: 74 - DNA, 409 bp, Homo sapiens
  misc_feature (358): n equals a,t,g, or c
  misc_feature (362): n equals a,t,g, or c
  misc_feature (377): n equals a,t,g, or c
  misc_feature (408): n equals a,t,g, or c
gtgacaatggttctaaaatccaaaactttgtattagaatgggatgaaggaaaaggaaatggagaattttgtcagtgttacatgggctcacagaaacaatttaaaattactaaactttcaccagcaatgggctgtaaattcagactatcggccagaaatgactatggtacaagtggttttagtgaagaagtcttatattacacctcaggctgtgctccttctatgccagcaagtcctgtattaaccaaggctggaattacttggttatccttacaatgggagtaagccctcaggaacaccatcagatgaaggrattttcttacattttagagatggaggaagaaacttcaggrtatggntttnaagcctaaatatggnggagaagatcttgcttacacagtgaaaatcnc

SEQ ID NO: 75 - DNA, 698 bp, Homo sapiens
  misc_feature (509): n equals a,t,g, or c
  misc_feature (600): n equals a,t,g, or c
  misc_feature (641): n equals a,t,g, or c
  misc_feature (667): n equals a,t,g, or c
  misc_feature (698): n equals a,t,g, or c
aatgtaattagcacagtgttaaaagtgaacatttcatacaagcaaaaatactgaatacaataaatgtagtagaatcaataattaagtacatgggtaaattaataatatcatccatggtgagctaatgcccctaagaactggatgctttatcatacagttgcttgacattaccaacaagtattgtgacaaatttgattcaatcatttcattatgcaggcagaaaagatagtcttttaaaataactaaacatatgggaatataatgaagagtgtctatmgtaatcatttcatgaagacacaagtctgttcctargctattaatcttacttgcaagtttgatgaaaaaaagaaggatctcatgatttcttgctccaacttcccatgtacagaggctctcttctttcttttccagatagagactgattccttggaagtagctcttcacagcattagggagttgtcatggcctgagagagcccttccacccctaactcattcaacaagcagggntccaggacttcccaatgctgataaaaattcagtggaataatttctccaggggcaggttcattccaaccaacctcttgggttggattaaggngacaaactgctgggggaacctggggggggacagggggtagncttaggccccctgaatttgggtggcnccccccggggaacaattggaaaacattcaan

SEQ ID NO: 76 - DNA, 1204 bp, Homo sapiens
cagtgtaaataagaaaaacccaatggggggcttcttctgtgtctcaaagtccctgaggagctggaccccaaaggctgtctgtggtggccaaattcattccagagcttggctgaatagcaaagcaaataaactctaattgctggtcccacaatcagggccaagatgccttctccctcagaaggggagtggggagccgggcaccggctggaatggctgctatgtgcacgtctctgtgcagctgtgaactgtgaggtgctgggggtcgggggttttgatgaagggagggaaggacatgtatcttgctagggaccttcatcccatttggcttggccccctgctatgacatgggttgagatttgaactattccctcagaaagattgccmccccagcctgcttgacatcgctggcacactgaagccctggaaagggcagttcttaataaaaagtaccatgtatgaccctgcatttaaaaagcgatgatctgatgggctaaggaaaagctttttcttttatctaataaacaatattctagaggtgagtgtgggcccagtacaaagtcatacttcaaaccagctccctccagtgctggagggggttcgattcctgtggtctccctcgaggctgccatgtcaggtatttgccgctacatcagcatccccagaagcgaatccgaaaggagttcatgaaatctggagacttggccattgcatgttcaaactctgagaaggacagcatgttgtcattgtccagatccgactcactcaggacgtggttcgtgaggtccatcaggaggtcctcagacatgtcatcactgttcagcagtcgcaggatgatcctctgcagatcctcctcatcaatgaagccattctcattaaaatcatagatgcgaaaggcatactcaatcttcaggcttgggcaggcctgctcgctgaacacagatgccatgcccagcacatcctcaaaggagaacatgcctttgtgggagaacactctgcagatacggtctctgaaagggttgacccgcagagctggcagggagctgacctggtccatggtgagcgttgcctccttgtagtacttcccaggagggcagagcttcaggaaggtgtcatggatgcacagaatttcatttctggtcaggaaggtcagggcctggtactcttccagctcccagtgcatctgatacctcaagcattgccccat

SEQ ID NO: 77 - DNA, 2649 bp, Homo sapiens
  misc_feature (94): n equals a,t,g, or c
  misc_feature (2603): n equals a,t,g, or c
ccccgcacctccaagacagactcatatgaactggtgtggtggcctcggcatgagggccagtggccgggcgccaatcctctactatgtggtgaanaccgcaagtgcacaaattcctctgaacgattggaccatctctggcattccagccaaccagcaccgcctgaccctcaccagacttgaccccgggagcttgtatgaagtggagatggcagcttacaactgtgcgggagagggccagacagccatggtcaccttccgaactggacggcggcccaaacccgagrtcatggccagcaaggagcagcagatccagagagacgaccctggagccagtccccagagcagcagccagccagaccacggccgcctctcccccccagaagctcccgacaggcccaccatctccacggctccgagacctcagtgtacgtgacctggattccccgtgggaatggtgggttcccaatccagtccttccgtgtggagtacaagaagctaaagaaagtgggagactggattctggccaccagcgccatccccccgtcgcggctgtccgtggagatcacgggcctagagaaaggcacctcctacaagtttcgagtccgggctctgaacatgctgggggagagcgagcccagcgccccctctcggccctacgtggtgtcgggctacagcggtcgcgtgtacgagaggcccgtggcaggtccttatatcaccttcacggatgcggtcaatgagaccaccatcatgctcaagtggatgtacatcccagcaagtaacaacaacaccccaatccatggcttttatatctattatcgacccacagacagtgacaatgatagtgactacaagaaggatatggtggaaggggacaagtactggcactccatcagccacctgcagccagagacctcctacgacattaagatgcagtgcttcaatgaaggaggggagagcgagttcagcaacgtgatgatctgtgagaccaaagctcggaagtcttctggccagcctggtcgactgccacccccaactctggccccaccacagccgccccttcctgaaaccatagagcggccggtgggcactggggccatggtggctcgctccagcgacctgccctatctgattgtcggggtcgtcctgggctccatcgttctcatcatcgtcaccttcatccccttctgcttgtggagggcctggtctaagcaaaaacatacaacagacctgggttttcctcgaagtgcccttccaccctcctgcccgtatactatggtgccattgggaggactcccaggccaccaggccagtggacagccctacctcagtggcatcagtggacgggcctgtgctaatgggatccacatgaataggggctgcccytcggctgcagtgggctacccgggcatgaagccccagcagcactgcccaggcgagcttcagcaggctttctttagtcaggagcagatgctcctgttgttgagtgaagactggaaagttacctggactccccgccgtggccgtctcattactcttccttttgagcagcagagtgacaccagcagcctgctgaggcagacccatcttggcaatggatatgacccccaaagtcaccagatcacsagctgctgcagccccatcacgactgctgccaacgccaggagcagcctgctgctgtgggccagtcaggggtgaggagagcccccgacagtcctgtcctggaagcagtgtgggaccctccatttcactcagggcccccatgctgcttgggccttgtgccagttgaagaggtggacagtcctgactcctgccaagtgagtggaggagactggtgtccccagcaccccgtaggggcctacgtaggacaggaacctggaatgcagctctccccggggccactggtgcgtgtgtcttttgaaacaccacctctcacaatttaggcagaagctgatatcccagaaagactatatattgttttttttttttaaaaaaaaaaraagaaaaaagagacagagaaaattggtatttatttttctattatagccatatttatatatttatgcacttgtaaataaatgtatatgttttataattctggagagacataaggagtcctacccgttgaggttggagagggaaaataaagaagctgccacctaacaggagtcacccaggaaagcaccgcacaggctggcgcgggacagactcctaacctggggcctctgcagtggcaggcgaggctgcaggaggcccacagataagctggcaagaggaaggatcccaggcacatggttcatcacgagcatgagggaacagcaaggggcacggtatcacagcctggagacacccacacagatggctggatccggtgctacgggaaacattttcctaagatgcccatgagaacagaccaagatgtgtacagcactatgagcattaaaaaaccttccagaatcaataatccgtggcaacatatctctgtaaaaacaaacactgtaacttctaaataaatgtttagtcttccctgtaaccttcaaactgagtcatgtgtgagttcagcattttctttacatgttagaattcagtctctgagtatttgaagnaaatacccacttacaatattttcaggtccattagaaattagatctt

SEQ ID NO: 78 - DNA, 1077 bp, Homo sapiens
ttttttttttttttttttttgcccagcaaagacaaatatatttgtccctgttgctacaataggaagttaacaatctggcaagatatctgaacacaagcaaatgaaaacagttcacctaacacccatgcaaattataaatttcctcccatatacaaaatgatgagaaataacagcaaaaatgtatactttcttatttttgaacttttaaagttctagtttggtctttgaatcaaaacaaagtaaaagatgtttataaaagccatttccttttctttccccactatgctcatttgacttgctcttccccctatagggtaccctgagtcattcagagaaggagaattaatagcactgagttggtgatgaagctcctgttaggacatatggcttcacaaaaagaaatacttccagataagtcagagagacagttggacgtcttgagcaaatcttgaaagagatagggaagaaagcagaagttgttgggtggtgcttgtaagaaaaaggctcatacgatgaggaccagcttcttgtggatctccaggtctctgaccacagcactgaattcctcaaaggatatcttcccatcgccatccttgtccaggatgatgatggttttgtcgaccagctgctggagctgccagtccgtcaggttgttgcccaccatcatcttcagcacctggaagagctccccgttggaaatgtagccatctttatccatgtcgtaaatgctgaacgcaaacctcaacttctgctcctcgtcgcccttgacgctgaactgggaggtccccaggatgaattccttgaagtccacttctccatcaccgtcggtgtcgaagacgtcgatcactcgccgcaccaacgggttgtggcgcagctccggcagggacatgaactcctccacgctcagagaccctgatttgtccaagtccaacttcttaaacctcctgcccagccttttaatttcatcattgtcaaagtgggagcacatctccgccgggtaactggcctcgtttcccattgtggacatctggcaacggccacggctcaaagggtcggagaggggagcagggctctgcc

SEQ ID NO: 79 - DNA, 3849 bp, Homo sapiens
gatcttccccagctcctcaggagggtcggagcagcccgccagcccagcctctcccctcagcagccgccagacttctgtgcgcaggaggcgccaaccgcatcccaggcctgctgaagctcttccagaaaaactcgcccatggaggaccttggagccaaggggccaaggagaagatgaaagaggagtcatggcacatccacttcttcgagtacgggcgtggcgtgtgcatgtaccgcacagccaagacgcgggcactggtcctgaagggtatccctgagagcctccggggagagctgtggctcctcttctccggggcctggaatgagatggtgactcaccccgggtactatgctgagctggtggagaagtccaccgggaagtacagcctggccacagaggagatcgagcgagacctgcaccgctccatgcccgagcaccctgccttccagaacgagctggggattgctgccctccggcgggtgctgactgcctatgccttccgaaaccccaccatcggctactgccaggcaatgaacatcgtgacctcggtgctcctgctctatggcagtgaggaggaggccttctggctcctggtggccctgtgcgagcgcatgctgcccgactactacaacaccagggtggtgggagccctggtggaccaaggcatcttcgaagagctcacgagagacttcctgccgcagctctcggagaagatgcaggacctgggggtgatctccagcatctcgctgtcctggttcctgaccctcttcctcagcgtcatgcccttcgagagcgccgtggtcatcgtcgactgctttttctatgagggcatcaaggtgatcctgcaggtggccctggccgtcctggacgccaacatggagcagctgctgggctgcagcgacgagggcgaggccatgaccatgctgggcagatacctggataatgtggtcaacaagcagagtgtctctcctcctatcccgcacctccgtgccttgctgagcagcagcgatgacccccctgcagaggtggacatctttgagctcctgaaagtgtcctatgagaaattcagcagcctgagggccgaagacattgagcagatgcggtttaaacagaggctgaaagtgatccagtccttggaggacacggccaagaggagtgtggtccgagctatacctgtggacattggtttctccattgaagagctggaggacctttacatggtgtttaaggccaagcacctggctagccagtactgggggtgcagccgcacaatggccggccgtcgggaccccagcctgccctacctggagcagtaccggattgatgccagccagttccgggaactctttgccagcctgacaccctgggcctgtggctcccacacacctctgctggcagggcgcatgttcaggctcctggacgaaaacaaggactcgctgatcaacttcaaggagttcgtgacagggatgagcgggatgtaccacggggacctgacagagaagctcaaggtgctctacaagctacaccttcccccagctctgagcccagaggaagccgagtcagccctggaggcggcccattatttcacagaggacagctcctcagaagaagcactaccacaggaagagcaagaaggaagtggaagtgaggagagaggagaggagaaggggaccagctctccggactatcggcactaccttcgaatgtgggccaaggagaaagaggctcagaaggagacgattaaggatcttcccaagatgaaccaggagcagttcattgagctgtgcaagacgctttacaacatgttcagtgaagaccccatggagcaggacctgtaccacgccatcgccaccgtggccagcctcctgctccgcatcggagaggtggggaagaagttctcagcccgcacaggcaggaagcccagggactgtgccactgaggaggacgagccaccagcacccgaactgcatcaggacgcagccagggagcttcagcccccagctgcaggagacccccaagccaaagcaggcggagacacacacctcggaamagccccacaggagagccaggtggtggtggaggggggcagcggcgagggacagggctcaccctcccagctgctgtctgacgatgaaaccaaagacgacatgtccatgtcctcctactcggtggtcagcacgggctccctgcaatgtgaagaccttgcagacgacacggtgctggtgggcggggaggcctgcagccccacagcgcgcatcggcggcaccgtcgacaccgactggtgcatctcctttgagcagatcctggcctccatcctgacggagtccgtgctggtgaacttctttgagaagagagtggacattggactcaagatcaaggaccaaaagaaagtggagagacagttcagcaccgccagtgaccatgagcagcctggagtttccggctgatgcctgcagctgtgaggcctggcccaaggtgtcatcagtggggctggcctcatctcctcctgcctttcctcccttatcagtttctctttaaaggtgtgcccctcctgctctcccaggagcagtgagttgtgagtggaaagaaggctggtgcagacccagctgccttagacagattccctgggcctgcatctcctggcgccggctgcttctgggcccaggaagaggctgtggctcccaccttccttacacctggtgggagcccgcctcgcaccagctgcacctgcctagcattacaggctctcagatctgcccttgcttgcctcatacctctgtgctccacactgcggccaggccagctgagtccctccatccgtggatgctttcctgcagctatgtggtatgggggtcattcctgcctcttggcaccaggttggggggcatgtgcttgttgggcaccaaagtgatggaaccctcaggtgctctccgggagcctgaacctcctgactgaggaacatgggcagaacatgtttattgcacagagtgggcgctgcgcacaggcgtggctgtacacgtgctctcagctcatcatcctttccagtaactttaaaaaaacatccctcaggtcctgatatatttccttggattcatttcacttggctagaaattacactgtgctcaatgccttaataaatccctgaaagaaataaaaaccactgtgtgcaatgccttgctgtggcccccaaccactgcttaggcctcccaacttctccccaggccaagtatggggccctggctgtgttctggaagttcaagacacttagtcctccacagtgggtggaagagtgcaaggtctgccaggtcagatggagacgcagaacctgctggtgcaagctgggcaggtcctgaccaacctgcatcaggggatgccctgagctccacaggtcttcatgggcaggggttgtgggtcctggtgaaggaagtgcatcctcaggcctgggctgtagcaagctgtctgcccttgggttcaagaaccagactgtggagccaaaggtgaccgcagggggccccagggctggagccacaaggataccctcactttgcatgaggagctgaaactgaccagtgtccagtgttagcccccacatggggctgctcttgcttctactaaaagatacagcagttacccccttatccacaggggatacagtggatatctaaaaccagacccccagtggatgtctaaaaccacagataataacaaaccttatacatactgttttttcctatgcatacatacctgtgattaagtttatgaattaggcaccttaagagattgacaacaataactaataataaaatgtaacggttatactgtaaaaaaaaaaaaaaaaagggcggccgct

SEQ ID NO: 80 - DNA, 1536 bp, Homo sapiens
ggcacgagtggtgggttaaccatacggaggtgactattccttacctggccacagatgtgacttgtgtggggccaggagcacacaagggccaaagtgtgatctccctggatctgtacacctgtgagttagatctgactaacctgattctgttctcactttccatatctgtatctctctttctcatggtgatgatgacagcaagtcacctctatttctgggatgtgtggtatatttaccatttctgtaaggccaagataaaggggtatcagcgtctaatatcaccagactgttgctatgatgcttttattgtgtatgacactaaagacccagctgtgaccgagtgggttttggctgagctggtggccaaactggaagacccaagagagaaacattttaatttatgtctcgaggaaagggactggttaccagggcagccagttctggaaaacctttcccagagcatacagcttagcaaaaagacagtgtttgtgatgacagacaagtatgcaaagactgaaaattttaagatagcattttacttgtcccatcagaggctcatggatgaaaaagttgatgtgattatcttgatatttcttgagaagccctttcagaagtccaagttcctccagctccggaaaaggctctgtgggagttctgtccttgagtggccaacaaacccgcaagctcacccatacttctggcagtgctaaagaacgccctggccacagacaatcatgtggcctatagtcaggtgtcaaggaaacggtctagccttctttgcaaaacacaactgcctagtttaccaaggagaggcctggctgtttaaattgttttcatatatatcacaccaaaagcgtgttttgaaattcttcaagaaatgagattgcccatatttcaggggagccaccaacgtctgtcacaggagttggaaagatggggtttatataatgcatcaagtcttctttcttatctctctgtgtctctatttgcacttgagtctctcacctcagctcctgtaaaagagtggcaagtaaaaaacatggggctctgattctcctgtaattgtgataattaaatatacacacaatcatgacattgagaagaactgcatttctacccttaaaaagtactggtatatacagaaatagggttaaaaaaaaactcaagctctctctatatgagaccaaaatgtactagagttagtttagtgaaataaaaaaccagtcagctggccgggcatggtggctcatgcttgtaatcccagcactttgggaggccgaggcaggtggatcacgaggtcaggagtttgagaccagtctggccaacatggtgaaaccccgtctgtactaaaaatacaaaaattagctgggcgtggtggtgggtgcctgtaatcccagctacttgggaggctgaggcaggagaatcgcttgaacccgggaggtggaggtggcagtgagccgagatcacgccactgcaatgcagcccgggcaacagagctagactgtctcaaaagagcaaaaaaaaaaaaaaaaaaaa

SEQ ID NO: 81 - DNA, 2002 bp, Homo sapiens
ggtggctgctccggcccttccgcctccagctcggccatggggtcgcgcagctcccacgccgcggtcattcccgacggggacagtattcggcgagagaccggcttctcccaagccagcctgctccgcctgcaccaccggttccgggcactggacaggaataagaagggctacctgagccgcatggatctccagcagataggggcgctcgccgtgaaccccctgggagaccgaattatagaaagcttcttccccgatgggagccagcgagtggatttcccaggctttgtcagggtcttggctcattttcgccctgtagaagatgaggacacagaaacccaagaccccaagaaacctgaacctctcaacagcagaaggaacaaacttcactatgcatttcagctctatgacctggatcgcgatgggaagatctccaggcatgagatgctgcaggttctccgtctgatggttggggtacaggtgacagaagagcagctggagaacatcgctgaccgcacggtgcaggaggctgatgaagatggggatggggctgtgtccttcgtggagttcaccaagtccttagagaagatggacgttgagcaaaaaatgagcatccggatcctgaagtgactccgtttgtgccttgggcttgctcctgcaaccagtatctccttggaattcatccaaagcccccatggacgcatggacgcagggcgacaataaactgtattttcgtttctaactctatttagggccaagagaagaaagctggaaggatgtgtactaaagtctagctcagcagtccccaacctttttggcatcagggacagtttttccacggatgggtgacaggggatggttttgggatgattcaagtgcattacatttattgtgcactttatttctattatgattacattgtaatatataatgaaataattatacaactcaccataatgtagaatcagcaggagccctgagcttgttttcctgcaattagacggtcccatatgggagtgatgggagacagtgacagatcatcaggcattagattctcataaggagtgcacaatctagatcctttggtgtgcagttcacagtaggatttgggctcctatgataatctaatgccactgctgatctgacaggaggcagagctcaggcggtaatgcaagcaatggggagtggctgtaaatatagatgaagcttcagctcgcctgccgctcaccttgtgctgtgcagcccggttcctaacagaccacagaccccacaccaggtctatctcatttggtctcagagctgtgaatcagccagcaatattttagttgcaaatcactgaaaacccaactcaaagtgacttaagtcagaaagaaattttatgaattcaggtaattaaaaagtccagaagtatctgcctttaggcacagctggatccaagggcacaaatgatgtcatcaggctccagttattctccatctcccagctcagctttttctgtctgtaagcctgattttcaggaaggctctttcctagtgatggagatgaccaccatcagctccaggcttctatcctgctaacccagtaacccagtgggaagagatttacttattccaataattccaagtggagagtgtcattgacccgtttggggtctcatctctacttctaggggaatgaaacactctgagtggccaggcctgtgtcatgtgctaattcctagagccagggaaataaggtctgaggattcaggatggggtgaaaggtggttgcttaaaggaaaatgaaatacaattagcagaataaggggaaacgagtggtctgctctgctcgggcaaaacaagagatgcccattactgtgagggacccttgaagtctggactcttaaatgggtttttgctgatttcctgggtgcatgctaggatgatggggcttgatgcagtagggaagagacgatgtaaaaataataaacaatatataccttcctagagtgtgaatgcaaaaaaaa

SEQ ID NO: 82 - DNA, 954 bp, Homo sapiens
  misc_feature (946): n equals a,t,g, or c
  misc_feature (954): n equals a,t,g, or c
cctcaaagagacccattctcatctttcttcagaagttacaaagaactggaatgaaatgacagagttggtctcctccaacggcaattactgcaattaccgcaagcctttgccgactgcgatggcttcaaaatccccatccttggagtacacttgaaagacttgatagctgtccatgtcattttcccagactggacagaggagaacaaagtgaacattgtgaaaatgcaccagctctccgttaccctgagtgaactagtctccctgcagaatgcctctcaccacttagaacccaacatggatttgatcaacctgctcacgctttctctggacctctatcacactgaagatgatatttacaaactgtcactggtgctggagcctagaaattctaaatcgcagcctacctcccctacgacgcccaacaagcctgtggtacccctggagtgggcattaggggtgatgccaaagccagaccccacggtcatcaacaagcacataaggaaattagtggagtctgtatttagaaactatgatcacgaccatgatgggtacatttcccaagaggactttgaaagtatagctgccaattttcccttcttggattccttctgtgttctggacaaagatcaggatggcctaattagtaaagatgaaatgatggcttacttcctgagagctaaatcccaactacactgttaaaatgggaccaggatttatccataattttcaggagatgacctatctcaagccaaccttckgcgaacactgtgcgggatttctctggggcataatcaagcaaggatacaaatgcaaagactgtggagccaattgtcacaaacagtgcaaagacctcctggttctggcctgcaggagatttgcccgggcgcccttcttgagcagtggtcatgggtcactggctggaagcccctcgctgcccccaccgcangatgaggn

SEQ ID NO: 83 - DNA, 2104 bp, Homo sapiens
actcctgagctcaggcaatctgtccacctcgacctcccaaactgctaggattacaagcgtgagcacccagcctcatacttatttttaatatttaaaatgattttgcttttcttgyttcttagtgcatgtaaagaagtatctttgcctgctgtataactgtgtgtatctcattttcctcacagtacttattgattccatttacaaagtgactgagggccggcagtctgaaatattccacakacaagctgaggggaacttcgaccccagctgctgcttcaccatctaccatggcaaccacatggagtccctggacctcatcacctccaaccccgaggaggcccgcacctggatcacaggcctcaagtacctgatggctggcatcagtgatgaagactcccttgccaaaaggcagaggacccatgaccaatgggtgaagcagacctttgaggaagctgataagaatggtgacggcttgctgaatattgaagagatacatcagctgatgcataaactgaatgttaatctgccccgaagaaaagtcagacaaatgtttcaggaagccgacacagatgagaatcagggaactttgacatttgaagagttctgtgttttttacaaaatgatgtctttgagacgagacctttatttgttacttttgagctacagtgacaagaaagatcacctaactgtggaagaactggctcagtttttgaaggtggagcaaaaggtatcattagactgttaaaatgaaagtttacttaaaagtactcatgaaagatatgtctttcttttggggttaaatataggtatactttgaattttgcaaaggtggtaaatatcactagttcacaaaaatcttatctatgagtcatttaaaacagtttctagcagcttttaagacaggaagtgataacttgaacactgggttatataattcttaatcttaaatgtattgagtacagatatgcctattttccccacaaagaaatgaatgttaatattttaatacaatggtaatactttctttatactaatactatgatgtattaatattagtttaaatttatactatatattagtataaattcatattagtataaatttagtcaaatttatttattttaaatataaatttatatttatactaataaaatagctagatatttaactatggcataattcttaactactattgtggtaggtcattggtaattctgatagtaaattgccatttgatcatgtgaaaaggctaagtaaattaggtcctgattagcaaagagaatctctaagtatgtttaaaataaggtgttttaatcttaatattatataggctgaattatggkcagcaaagctaacttctcagtctgctttttaaatatctcctcaaagtctgtttctcactaaagtagaggaataaatgaatgttttattcaaattttttaaccttttatattagacttcttgagaggaggctttggttttgtgcagttgatgaggtttacttttaattctcttaatggaccaatcgycttaatataaagagctgcttaactcctttgttcattttawktcagcggcatttagctctgttgaaattgtaaaaaatcatcaaatatttggactatatagtacaataatcagtagaaataattctttctacagtactcacacaaataatcagccagcttgtgcttgaacactttccaattttttaataaaggctttattgagatattatycacataccataaaattcaccatttttaaagtatacatttaagtgttttttagtgtatcaacagagttgtgcaactattggccaggcacggtgtctcatgcctgtaatcccagcactttgggaggctgaggcgggtggatcacctgaggtcaggagtttgagacaagcctagccaacatggcgaaacccagtctytactaaaaatacaaaaattagcaggctgtggtggcgaacccctgtaatctcagctacttgggagtctgaggcagggagaattgcttgaacccaggaggtggaggktgtagtgagctgagattgagcccctgcactccagcctgggcggcagagcgagactccacctcaaaa

SEQ ID NO: 84 - DNA, 467 bp, Homo sapiens
  misc_feature (428): n equals a,t,g, or c
  misc_feature (467): n equals a,t,g, or c
ggcacgagtacgagttcaaagtgagaccatcctctggccgggytcgaggccctgacagcaacgtgctgctcctgaggctgccggaaaaagtgcccagtgccccacctcaggaagtgactctaaagcctggcaatggcactgtctttgtgagctgggtcccaccacctgctgaaaaccacaatggcatcatccgtggctaccaggtctggagcctgggcaacacatcactgccaccagccaactggactgtagttggtgagcagacccagctggaaatcgccacccatatgccrggctcctactgcgtgcaatggctgcagtcactggtgctggagctggggagcccagtagacctgtctgsctccttttagagcaggccatggagcgagcacccaagaacccatgagcatggtccctgggacctggancagctgaaggctacttggaagcggctgaagtcatgccan

SEQ ID NO: 85 - DNA, 2454 bp, Homo sapiens
  misc_feature (2348): n equals a,t,g, or c
  misc_feature (2349): n equals a,t,g, or c
  misc_feature (2350): n equals a,t,g, or c
  misc_feature (2351): n equals a,t,g, or c
  misc_feature (2352): n equals a,t,g, or c
  misc_feature (2442): n equals a,t,g, or c
ggtggagtaagccagaaggctgttcacccgaggaagtgatcacctacaccttggaaattcaggaggatgaaaatgataaccttttccacccaaaatacactggagaggatttaacctgtactgtgaaaaatctcaaaagaagcacacagtataaattcaggctgactgcttctaatacggaaggaaaaagctgtccaagcgaagttcttgtttgtacgacgagtcctgacaggcctggacctcctaccagaccgcttgtcaaaggcccagttacatctcatggctttagtgtcaaatgggatccccctaaggacaatggtggttcagaaatcctcaagtacttgctagagattactgatggaaattctgaagcgaatcagtgggaagtggcctacagtgggtcggctaccgaatacaccttcacccacttgaaaccaggcactttgtacaaactccgagcatgctgcatcagtaccggcggacacagccagtgttctgaaagtctccctgttcgcacactaagcattgcaccaggtcaatgtcgaccaccgagggttttgggtagaccaaagcacaaagaagtccacttagagtgggatgttcctgcatcggaaagtggctgtgaggtctcagagtacagcgtggagatgacggagcccgaagacgtagcctcggaagtgtaccatggcccagagctggagtgcaccgtcggcaacctgcttcctggaaccgtgtatcgcttccgggtgagggctctgaatgatggagggtatggtccctattctgatgtctcagaaattaccactgctgcagggcctcctggacaatgcaaagcaccttgtatttcttgtacacctgatggatgtgtcttagtgggttgggagagtcctgatagttctggtgctgacatctcagagtacaggttggaatggggagaagatgaagaatccttagaactcatttatcatgggacagacacccgttttgaaataagagacctgttgcctgctgcacagtattgctgtagactacaggccttcaatcaagcaggggcagggccgtacagtgaacttgtcctttgccagacgccagcgtctgcccctgaccccgtctccactctctgtgtcctggaggaggagccccttgatgcctaccctgattcaccttctgcgtgccttgtactgaactgggaagagccgtgcaataacggatctgaaatccttgcttacaccattgatctaggagacactagcattaccgtgggcaacaccaccatgcatgttatgaaagatctccttccagaaaccacctaccggwtcagaattcaggctataaatgaaattggagctggaccatttagtcagttcattaaagcaaaaactcggccattaccacccttgcctcctaggctagaatgtgctgctgctggtcctcagagcctgaagctaaaatggggagacagtaactccaagacacatgctgctgaggacattgtgtacacactacagctggaggacagaaacaagaggtttatttcaatctacagaggacccagccacacctacaaggtccagagactgacggaattcacatgctactccttcagaatccaggcagcaagcgaggctggagaagggcccttctcagaaacctataccttcagcacaaccaaaagtgtcccccccaccatcaaagcacctcgagtaacacagttagaaggaaattcatgtgaaattttatgggagacggtaccatcaatgaaaggtgaccctgttaactacattctgcaggtattggttggaagagaatctgagtacaaacaggtgtacaagggagaagaagccacattccaaatctcaggcctccagaccaacacagactacaggttccgcgtatgtgcgtgtcgtcgctgtttagacacctctcaggagctaagcggagccttcagcccctctgcggcttttgtattacaacgaagtgaggtcatgcttacaggggacatggggagcttagatgatcccaaaatgaagagcatgatgcctactgatgaacagtttgcagccatcattgtgcttggctttgcaactttgtccattttatttgcctttatattacagtacttcttaatgaagtaaacccaacaaaactagaggtatgaattaatgctacacattttaatacacacatttattcagatactcccctttttaaagcccttttgttttttgatttatatactctgttttacagatttagctagaaaaaaaatgtcagtgttttggtgcacctttttgaaatgcaaaactaggaaaaggttaaactggatttttttttttaaaaaaaagaannnnnaagaagaaaagtataccagataccaaaagctagctttcttatggtttcctttaaattttcagaattaccttcattctggtttcactggangccttttgcaag

SEQ ID NO: 86 - DNA, 1204 bp, Homo sapiens
  misc_feature (1196): n equals a,t,g, or c
gggaaaagccactaaatgacactgtyactgaatatgaagttatatccagagaaaatgggtcattcagtgggaagaacaagtccattcaaatgacaaatcagacattttccacagtagaaaatctgaaaccaaacacgagttatgaattccaggtgaaacccaaaaacccrcttggtgaaggcccggtcagcaacacagtggcattcagtactgaatcagcggacccaagagtgagtgagccagtttctgcaggaagagatgccatctggactgaaagaccctttaattcagactcttactcagagtgtaagggcaaacaatatgtcaaaaggacatggtataaaaaatttgtaggagtgcagctgtgcaactctctcagatacaagatttacttgagcgactccctcacaggaaaattttataacataggtgatcagaggggccatggagaagatcactgccagtttgtggattcatttttagatggacgcactgggcagcaactcacttctgaccagttaccaatcaaagaaggttatttcagagcagttcgccaggaacctgtccaatttggagaaataggtggtcacaccaaatcaattatgttcagtggtatgaatgtgggactacaattcctggaaaatggtagatgctgcacaaagttaccttctgtttcatcattgcaaacaaaaatcattgaaaatactatgccgcattcatttaaagctattttgtttactatgtataaaagtctacaatctaattaatagcaatactagatgtttattattagaaaagattgctgagagtatttatcaggttttacaaagtcattttaagaaagcaagatactgatgttaacagaataacatttttggggaagctggctccctattcatggtattttaagagatcatttgtatattatttatcacactgttgtaatgatgttttgagatacttttataacaaaattaacatcaaaaaggtatatactttttaaaaaaaatttacttttattgatgtgtactcttcctattgatgagttaattccataaatctctacttagtttaacttattggatcaaattatcttcagcatgtatatctgggaaaaaaagggccgattttcacatttatatttaaacttcaattttttatatttaaacttcaatttttagcaacagctgaatagnttttgcgg

SEQ ID NO: 87 - DNA, 2040 bp, Homo sapiens
gcggacgcgtgggcggcggcgtycagggtcggcagcaaccgcagscgagcccgagcgggtggcggcgccatggcgtgcgcggggctgctcaccgtgtgcctgctccggccgcccgcgccccagccccagccccagaccccgcggcacccccagctcgcgcccgacccggggcccgccggacacacgctcttccaggacgttttccgcagagcagacaagaatgatgatgggaagctctcatttgaggaattccagaattactttgccgatggggttctcagcctgggggagctgcaggaactgttcagcggcattgatgggcatctcaccgacaatttagaaacagaaaaactgtgtgactacttctcagagcacctgggtgtctaccggccggtgctggctgcattggaatcgctgaaccgtgcagtgctcgctgccatggatgccaccaagctggagtacgagagggcctccaaagtggaccagtttgtgacrcgcttcctgctgcgggagacggtgagccagctgcaagcccttcagagctcgctggagggggcgtcagataccctggaggcccaggcccatggctggcggtcagatgcagagagcgtggaggcgcagagcaggctctgcggcagccggcgggcaggacgccgagccctgaggagtgtcagccggtcatccacctggtcccccggctcttctgacacagggcgcagctcagaggccgagatgcagtggcggctccaggtgaaccgcctccaggagctcatcgaccagctcgagtgcaaggccccccggctggaacccctgcgtgaagaggacctggccaaggggcctgacttgcacatcctcatggcccagaggcaggtccaggtggcagaggaaggcctgcaggacttccaccgagccctgcgctgctatgtggacttcacaggggcccagagccattgtctgcatgtgtccgcccagaagatgctggacggtgcctccttcaccctgtatgagttctggcaggatgaggcctcctggagaaggcaccagcagtcgcctggcagcaaggccttccagcgcatcctcatcgaccacctgcgggccccggacaccctcaccactgtgttcttcccagcctcctggtggataatgaataacaactgagccagacctgcacacgccgagggccccgggaccctgcctgcctccctctggagccttctggactggccagcccagcgcaaagaccagggcttgtctcctcctggacttgggcctggtggaagggctctcagcccagggatcagggactgggctgcttgctttctatttattattgatttatttatccctgtattttattgtttgtcacttcagcctccaagctactttggcttctgcctggctcaggagacctggattctggtccctgctgtccctgcctggctgagcgacccagggcaggtcccgtccctgtctgggtgggcctcaggccatctggccgcctagcgagggtcctgctttcttcctgctgtcttgggaccaggcttctgctcctcctcagccagcggcagaagcagggctgatgctcagggaccccccaaccctcaaaccttgcctccgaggctgggcctgagctgggtgccccgtcgccctcccaggccactaggctctgactcttccagcacccatggatgtgccagaggcctctgggttggtttgcatgtcatttgcatatcgtttgcatgccctcatcccacccattctcagggcagtatgggaagccccaaggtgacctggccaagtagcaataatttgggtccagggtcacctattgcccccagaggcctctgaaccccaggctgggaccccagcacagaggcaataaaggcagtggtcccttccaaaaaaaaaaaaaaaaaaaaaaaaaaaaaaaaaaaaaaaaaaaaaaaaaaaaaaaaaaaaaaaaaatttatattaaaaaaaaaaaaaaaaaaaaaaaaaaaaaaaaaaaaaaaaaaaaaaaaaaagggsgggcccttttta

SEQ ID NO: 88 - DNA, 1896 bp, Homo sapiens
  misc_feature (1718): n equals a,t,g, or c
  misc_feature (1832): n equals a,t,g, or c
  misc_feature (1859): n equals a,t,g, or c
  misc_feature (1871): n equals a,t,g, or c
  misc_feature (1887): n equals a,t,g, or c
aaactgtagtaaaaatgagaaaaggctagaagaacagaatgaggaaatgatgaagaaggttttagcacagtatgatgagaaagcccagagctttgaggaagtgaagaagaagaagatggagttcctgcatgagcagatggtccactttctgcagagcatggacactgccaaagacaccctggagaccatcgtgagagaagcagaggagcttgatgaggccgtcttcctgacttcgtttgaggaaatcaatgaaaggttgctttctgcaatggagagcactgcttctttagagaaaatgcctgctgcgttttcccttttcgaacattatgatgacagctcggcaagaagtgaccagatgttaaaacaagtggctgttccacagctcctagattagaacctcaggaaccaaattctgccaccagcacaacaattgcagtttactggagcatgaacaaggaagatgtcattgattcatttcaggtttactgcatggaggagccacaagatgatcaagaagtaaatgagttggtagaagaatacagactgacagtgaaagaaagctactgcatttttgaagatctggaacctgaccgatgctatcaagtgtgggtgatggctgtgaacttcactggatgtagcctgcccagtgaaagggccatctttaggacagcaccctccacccctgtgatccgcgctgaggactgtactgtgtgttggaacacagccactatccgatggcggcccaccaccccagaggccacggagacctacactctggagtactgcagacagcactctcctgagggagagggcctcagatctttctctggaatcaaaggactccagctgaaagttaacctccaacccaatgataactactttttctatgtgagggccatcaatgcatttgggacaagtgaacagagtgaagctgctctcatctccaccagaggaaccagatttctcttgttgagagaaacagctcatcctgctctacacatttcctcaagtgggacagtgatcagctttggtgagaggagacggctgacggaaatcccgtcagtgctgggtgaggagctgccttcctgtggccagcattactgggaaaccacagtcacagactgcccagcatatcgactcggcatctgctccagctcggctgtgcaggcaggtgccctaggacaaggggagacctcatggtacatgcactgctctgagccacagagatacacatttttctacagtggtattgtgagtgatgttcatgtgactgagcgtccagccagagtgggcatcctgctggactacaacaaccagagacttatcttcatcaacgcagagagcgagcagttgctcttcatcatcaggcacaggtttaatgagggtgtccaccctgcctttgccctggagaaacctggaaaatgtactttgcacctggggatagagcccccggattctgtaaggcacaagtgatccttggctttcagaatttgcaagaacagcgatttgaattttgggggggtctgctgttcattcctttaggtgctatacattattcaaaaagtctcccgcgcatttgcactaatgatggctgcatgcatagcaatcagcatgtgagcaaaatcgacaagaaaaccttgactttacagagcagtgtgtgagtaaacagaatgaaaacaacaacctccactctttagtttatataagtttgagttctntcctaaattaaaagatctacacttgagttgggaaccgaaagagaaaaatggacttccatctgttttactggtaaaggaaatcctctgatggacaggttcagaattgaaaggaangttgttgctgggtaaaaaactctctgnacaaaaaaaccnttgggaatgctttccnccaaaaatg

SEQ ID NO: 89 - DNA, 2778 bp, Homo sapiens
  misc_feature (10): n equals a,t,g, or c
  misc_feature (41): n equals a,t,g, or c
  misc_feature (51): n equals a,t,g, or c
  misc_feature (2734): n equals a,t,g, or c
  misc_feature (2735): n equals a,t,g, or c
  misc_feature (2736): n equals a,t,g, or c
  misc_feature (2741): n equals a,t,g, or c
  misc_feature (2742): n equals a,t,g, or c
aataaaaaantttaaaaaaggggtaattggggaaaggaaanggggcccggnaggtataaaaacccaaagtggccccaaagtattaatggcctaatccttttgggtttacctataagatggataataactattttttccattgggaatatacatttttccttaatgttcccaacatctatactttgtaaagtcaaaacatttccccatgagctgtagttattcatccttctgtacaaaatgaaaagtttggaaattgtttgccctgataccttgaaaaagaagccagaatatttatttgcttcatcaacttcagtgtatatcattttgtgttattttatacgaaaacatgtttattattttcatttttgtaaaaggaagtaaaaggtcaacattttctctcatgtaccaaccttgtttgtatttctattttctgtaatgtttaagtatgatgttgaagaaattcacattctcttatagtttggatgggaagactattgactatttcagaaacagacttatttcagaggcttattgttttctctgtatttacctaatattttataacttttatgaatcagaataatgtccttcataaatttgtttaattgaagtcatctacttctaacaggacagatacacaactatttgaggtttacaaattacatctttgataagggaaatggtttcgtgacatgtacacagttgctattaaaatgtaactctatatattctatatgattgtaaatattttatacaacaatacaaataaaatatttttctattatatttattatgttgaaacacagtagttgtttcctgttagctaatataaataacataaataacactgtcaaacaagaagttggaagtgctgacaattctaggcttcaagatttaactcatgctgcaattacaccctttcatgcggtttggagttatcccaatatttgttcagtagattaaaatgaatgcatatttaaacaccatttataagccattattgtgtactttgctaaagcagtctatataactgttttgttatgtttggcataaaggaaacataaaaacattgcagcatctaggcaataaagtgtcaaaaggagaacttaacttagggtatttcatcattgaaagtagtgggaggggtagggaataggaaaacactaaaatggttctgaatgaaatttggaaagtggtagttgtttgttttggtgacagtggcatgtgcatgcttcagtggaaaacatctggtgataaaaatggacaacagaggaccaatgctcctaagggaggaaaaggggctgagtaagaataagaaaagtgggcattaacgtccaacactgatattacaggttttgcagctgggatctttctttgcatttgcagtagacaaactcatgagctgatgaccagtgatttctgccacggtgcccagagaaagatccacagggtcagtgtaaatgacttctaaaatgacatcctgggcatggtggtaaaccagcaccccatcttcttctgtacaggtcaaaaatttattatccttagaatttagttgaggaaggcgctgcttacaaaattcatctcctggtgatcccacaggagcaataacaagaatcacataatgataagcagtgtacatacagtagaagtccccaaagtataagttagtattggggttaaaaagtttttctgcggcaatctcaaacctgtatcttccataaggtgaatcctggggtggctttccagtattgaattcagtgctgcagctgaagaagatgccttctaattttccactgataggagagccatggctaccactgttatccttgacagatggctgcatagcattcccatgatgttctcgaacatagtcaaaatattctttgtgctgattacgataaaaaacagaaaacttaagcatgcgtcctgcaatcacttcagccttctccaacaattgtgttagatgaacttttgaatagtctgcggtgcagaattctataatttcactccattcagacacaacataatcaccatcaacttgttttgaggcagtctgcactgctactgtatattcagttcttgggcttaaaaaccagtgtccacggacagtcataggcaagggaacagcttttgccaccaattttgtgggaacatccttgtgtttaaatttattggagttcttgttctctttcttgttgaggtcaataaaatagtgtgtaatgcgatcctttgattttgaatccatttcccatgaaatcttgaatgagtcacacgttatattgcttattttgatgttatgtggtacaggaagttcttccatctctgctatgccactgtcttgtgatttgttcccgtcccggtcgcacagctgaatggcctccaggctgaggtttttgatcacctcctcacaggggctggtggggctgttgagggcatgatccaggcgcggcacctccatttttccaacccactctgaagcccgcctgcttcgtatccaggctctctctgccggccgggtgggcaagaagagcgggaaagggagggggagtggcagagggagggaaggaggcctgggacgcggtgatgcggcgccgaggctgaggcgcggggctggagagccgccgcgaaggcgacggctgtggcaggagctccgcggagtgtgcggctctgagagaccgagcaggacccggcgcgaggatgggaggcgcgcgctcccggcggggaggggacgcgnnncgcgnngaacgtgagggagagggcacgactcgcacacgcgcg

SEQ ID NO: 90 - DNA, 1195 bp, Homo sapiens
ttggcmacttttggaaaggscgatcggtcgggcctyttcgctattacgccagctggcgaaagggggatgtgctgcaaggcgattaagttgggtamcgccagggttttcccagtcacgacgttgtaaamcgacggccagtgaattgaatttaggtgacactatagaagagctatgacgtcgcatgcacgcgtacgtaagcttggatcctctagagcggccgccctttttttttttttttctgcctcatctttagcaatagctagctgcatttcagcgttttgtcttttaatattgtagtattgcacttctacttcatgtgttaactgaagccatttctgaagtgcatctggaacagaccaactgcttctcagttcaaattctttttcggcctttttcagagccatgcgaacctgttccaattcctgttctgcatactgacgtctactcaattcacattcagctccctcccttagctctctcagccgacaagcctcctcctttgcataattgatttcatccatcattttgcgctctaaattttgcttttctacagcaacatttctgttttcttcctgtgccttttcaagcctctcytgtaagtccattagactttgctctgcagtttgtaagctctctaaatctttcatcatttttgcaacatgttcttttgatgtcttattctgcgtataagcaaaccagcagcctccaacaccaattactatagaaactgtgaggataaaatctttcatccagttatgaggtgggcgtgttagaggtccaaacaaaaccacatccaatgccttgagctgaagtttttgtctgtgactccggtcactgattttcaactgggagatcataaatgaaggttcgtgcactgctatcctgggaagtgtcgttcctttgacattgttgtctctaaaattcttctcatattggggtagttcaacaaactctatcaaccactgaagagtgtcttcaagggtccaattatgaacttctgatgttttccatcgtttccataaatcctcaatcgttatatgtttatcttctctgtgcagatggctgtgtttattagtagcatctttatatttcatatcttctctgatgaattcatcactttcctctacttcaattccaccatctttgtcatcatccatttgtttatgtattgtttgaagagcttccagactaaatc

SEQ ID NO: 91 - DNA, 1530 bp, Homo sapiens
  misc_feature (554): n equals a,t,g, or c
gcggtgcggctcctccctgcttttgaaaacaccaagacagggattccatatcctcgggtgaatctaaagacaggagttcctcctgacaccaataatgagacatgcacagcgggagccggttccctcctggtggaatttgggattctgagtcgactcctgggggactccacatttgagtgggtggccagacgagcagtgaaagccctttggaacctccggagcaatgatacaggattactaggcaatgtcgtgaacattcagacgggccactgggttggaaagcagagtggcctgggtgccgggctggactccttctatgaatacctcttgaaatcttacattctctttggagaaaaagaagacctagaaatgtttaatgctgcatatcagagtattcagaactacttaaraaragggcgggaagcctgcaatgaargagaaggaraccctycactytatgtcaacgtgaacatgttcagtgggcagctgatgaacacctggattgactctctgcagcctttttccctggactgcargtgctgataggagatgtngaagatgccatctgccttcatgccttctactatgccatatggaaacgatatggtgccctccctgagagatataactggcagctgcaggcccctgacgttctcttctacccactgagaccagagttagtggaatccacatatctcctctaccaggcaaccaagaatcccttctacctccatgtaggaatggatattctgcagagtctggaaaagtacacaaaagtcaagtgtgggtacgccacgctgcatcacgtcattgacaagtccacagaagaccggatggagagcttctttctcagtgagacctgtaaatatttgtatctgctgtttgatgaagacaatccagtacacaagtctggaaccagatacatgttcacaacagagggacacattgtatctgtggatgagcatcttcgggaattgccatggaaggaattcttctctgaagagggagggcaggaccaagggggaaagtctgtgcacaggccgaaacctcatgagttaaaagtcatcaactccagctccaactgcaatcgtgtacctgatgagaggaggtactccctgcccttaaagagcatctacatgcgacagattgaccagatggttggtttgatttgatctgctctctgtgaggcctcatcttgaaccagaccttaacgaccaaacccagaccatgccaaagtccagtctgaaatgaaaggggacagaagtcttgctgtccatggtggtgtaggaatttctgtgcaacacctcaccacgtctggttaatccttgcacacttcagtgtttctctcctgttcaataaaatgccctgttaaggatataatttgaagtgagaagatacatggaaattgccctcttatgacatgttgatgttataagcacaatagatggggcatctttggattgatgttcacagctttatacttcagaacctaagtctcttcactttgctggcacctgctatactggaatt

SEQ ID NO: 92 - DNA, 894 bp, Homo sapiens
  misc_feature (2): n equals a,t,g, or c
  misc_feature (12): n equals a,t,g, or c
  misc_feature (23): n equals a,t,g, or c
  misc_feature (25): n equals a,t,g, or c
  misc_feature (28): n equals a,t,g, or c
anagactttctnttagggatatncngcnacgcctccaggtaccggtccggaattcccgggtcgacccacgcgtccgcaagaatcccttctacctccatgtaggaatggatattctgcagagtctggaaaagtacacaaaagtcaagtgtgggtacgccacgctgcatcacgtcattgacaagtccacagaagaccggatggagagcttctttctcagtgagacctgtaaatatttgtatctgctgtttgatgaagacaatccagtacacaagtctggaaccagatacatgttcacaacagagggacacattgtatctgtggatgagcatcttcgggaattgccatggaaggaattcttctctgaagagggagggcaggaccaagggggaaagtctgtgcacaggccgaaacctcatgagttaaaagtcatcaactccagctccaactgcaatcgtgtacctgatgagaggaggtactccctgcccttaaagagcatctacatgcgacagattgaccagatggttggtttgatttgatctgctctctgtgaggcctcatcttgaaccagaccttaacgaccaaacccagaccatgccaaagtccagtctgaaatgaaaggggacagaagtcttgctgtccatggtggtgtaggaatttctgtgcaacacctcaccacgtctggttaatccttgcacacttcagtgtttctctcctgttcaataaaatgccctgttaaggatawaatttgaagtgagaagatacatggaaattgccctcttatgacatgttgatgttataagcacaatagatggggcatctttggattgatgttcacagctttatacttcagaacctaagtctcttcactttgctggcacctgctatactggaatt

SEQ ID NO: 93 - DNA, 2184 bp, Homo sapiens
ttttttttttttttttttaatttttaaaaaatagcctttaataaaaaatacaaaaatactgtatctttgaaacatgatctgtatattcagcaagtcctaagcttcctaatgtaaaataatctgtttaatattgtatttttatttgcaagtacattaaaacaaatcttattttacttgacagtaatatttatgatgctgacatcctcatagggcttatctgttttgggattgactttgacgttggagatcctctgtacaacttccattcctttagtcactcgtccaaatactgtatgcttattatcaagccaaggcgttggtactaccgttatgaaaaactgggatccattagtatttgatcccgcgttagccatgctgagtgtgtayggcctgtcatgtcgtaatgttgaatgaaattcatcttcaaattctcctccccatatgctttctcctcccataccagtacctgttggatctccagtctgaatcataaagcccttaattatacggtgaaatgtatgcccattataataaccatttctgctgtgaacacagaagttttccactgtcttagggcactcaacaggaaaaagtttggtgtgaatgtctcccatgctggtgtggataatggcactgtccgaaactcgtttaggtccttcagcttgagtagctgccatgacttcttctttagaaggtttctcattaaaaacatctcgatcagaatctgcacttttcgtatcttctggttctcgtttggtaaacatataaaatctattctttttgaatgatgtacagactattgttgggtcagcttgaatattctgaagaacaggattttcagaagctttcatttctatagtagttgcagcacgatgctttttggctatcccctggaacaaagccaattgcatcactctaatattttcttgtttgcctaaaatccgcacacaccggtttgtctctacatttataactttaatgcccagcattgttccatacagcacgaagtgtccagtttcatcaaaaactatattaattaatcttacagcatcaaccttctccaactcacgttctacagccattcgtcggccaaattccatgtctggtaactgttgcctcatctgttgcagttcagtaaacatgcttagtgattcatcaaagactctcatgagttttccagttacaaatctgaaaattctaacttttctatcagaaccaatagtagctattttcttcccatctggtgaaaaacatacgctggttggataagccttacacttggcaaattcatataaatcagtgtcagttttatattcccagttcacatttttggggaatttatattcatgaggaggcccagtccagtattcaatcatcccagatttgtcagaagacactactgctttgtaaactgggtttagccgtatctgagtaagaggtgatgtatggagtttgtcaaaaatatgaagtggctggttatctcctcggccatcataaatgaaaatttttcctgtactcttttcggaagcascaactraagaaattgcatcccytggscaatagatccactcacactgtccaggaaaatagccaagtttcagcatgttgatcatgtcaaaagttcactacatcaacaccttcattgctttatcatcacccacagaccagaccaatgctccctcagagctaactgcaatactctcaataactcccaggtgactacgaaaatgtttaacaaattcaattccctcttctatttttttccagaacttgacatgtccatcatgactggcagtaataataaaatctgttctcaggtccatatagctagagtggctttcaatctaccacaccacaaaacctatattctctgtattaccttccattgtttggtgcataccacatgggtgataacatctctatgcatgtaactgcgctcatacatggatgcactggggagattatcaagatagactctttcaaactctaagactttcctcttcttggccagtgttgcctccacaggtaaaggtccaacccagcgctcttcgttctcctcatcgttctcctgggacaccgccactgctactgccagctctctttcgctgagttctgttttttccggttcctccgggtcccggcgccttctacgtctctgctgaaaatcgctaccactttccgccc

SEQ ID NO: 94 - DNA, 536 bp, Homo sapiens
  misc_feature (514): n equals a,t,g, or c
  misc_feature (522): n equals a,t,g, or c
  misc_feature (532): n equals a,t,g, or c
ggcacgagctcaggcctggcagtcactgcagggcagacagaacatgaccctcacctgtgtattctgggatgtgactaaagggaccactggagactggtcttctgagggctgctccacggaggtcagacctgaggggaccgtgtgctgctgtgaccacctgacctttttcgccctgctcctgagacccaccttggaccagtccacggtgcatatcctcacacgcatctcccaggcgggctgtggggtctccatgatcttcctggccttcaccattattctttatgcctttctgaggtgtcttcatctgctgctggttcaccatcctttacctcccaagtcagagcaccacagtctcctcttctactgcaagattggaccaggcccactccgcatctcaagaataggaaggcacggccctgcaatatggactcagctctggctctctgtgtgaccttggcagtccgtgctctctctgtactccctcagtttccttctctgtacaaatgggttgggnaagggaanaggatgggancagg

SEQ ID NO: 95 - DNA, 638 bp, Homo sapiens
ggcacgagcccatccccacccgggtctgcaaggtcagtgaccttcatgaaggccacttctatgagttccgtgcccgggctgccaactgggcaggtgttggcgagctgtcggcacccagcagcctgtttgagtgcaaagagtggacaatgccccagccaggccccccgtacgatgtacgggcatccgaggtgcgggctacatccctggtgctgcagtgggaacccccactgtatatgggggctgggcctgtcacaggctatcacgtcagtttccaggaggaaggctctgagcagtggaagccggtcaccccaggccccatctctggcacccacctgagggtttccgacttgcagccaggaaagagttacgtgttccaggtacaggccatgaattcagctggtctggggcaaccgtccatgcccactgatcccgtgctcctggaggacaagccaggtgcccatgagatcgaggttggtgtggatgaagagggctttatctatttggcttttgaagcccctgaagcccccgactcctcagagtttcagtggtccaaagactacaagggcccactggacccccagagggtcaagatcgaggataaagttaacaagtccaaggtcatcctgaaagaacccggc

SEQ ID NO: 96 - DNA, 662 bp, Homo sapiens
  misc_feature (526): n equals a,t,g, or c
  misc_feature (602): n equals a,t,g, or c
  misc_feature (627): n equals a,t,g, or c
  misc_feature (643): n equals a,t,g, or c
  misc_feature (658): n equals a,t,g, or c
ggccgccgccgggactagaagtgagccgcccgggtcccaaacgccagccagccagtcagtgggtcccgcagtcgcccgcaaccggggcgaatcatggcggccgccaaggtggctttaaccaagagagcagatccagctgagcttagaacaatatttttgaagtatgcaagcattgagaaaaacggtgaatttttcatgtcccccaatgactttgtcactcgatacttgaacatttttggagaaagccagcctaatccaaagactgtggaacttttaagtggagtggtggatcagaccaaagatggattaatatcttttcaagaatttgttgcctttgaatctgtcctgtgtgcccctgatgctttgtttatggtagcctttcagctgtttgacaaagctggcaaaggagaagtaacttttgaggatgttaagcaagtttttggacagaccacaattcatcaacatattccatttaactgggattcagaatttgtgcaactacattttggaaaaraaaraaaaaranaccctgacatatgcggaatttactcagtttttatttggaaatccactggagcacgccaagcaagcctttgtgcacngggccatgctaggactgggagggtncagccatcgattccgngcatctggcacatcngccc

SEQ ID NO: 97 - DNA, 1442 bp, Homo sapiens
ggcacgagtgcaaggccaggaagctacagggaaagttctgatcaaaatacacaaagacacaagccaggtccccaccgcgcttggcgatgcatccatagcagccttggtgctgtggacactccctggggcccagcgaaggggagagtttgctcccaaaggcgcaccaatgaccaacatttgccccccggaggaaagaactggaaccagggtcaaggccaacctgtcagaggtgcttgtgtccagtgtcctgggggtcaacgtgaccagcactgaagtctatggggccttcacctgctccatccagaacatcagcttctcctccttcactcttcagagagctggccctacaagccacgtggctgcggtgctggcctccctcctggtcctgctggccctgctgctggccgccctgctctatgtcaagtgccgtctcaacgtgctgctctggtaccaggacgcgtatggggaggtggagataaacgacgggaagctctacgacgcctacgtctcctacagcgactgccccgaggaccgcaagttcgtgaacttcatcctaaagccgcagctggagcggcgtcggggctacaagctcttcctggacgaccgcgacctcctgccgcgcgctgagccctccgccgacctcttggtgaacctgagccgctgccgacgcctcatcgtggtgctttcggacgccttcctgagccgggcctggtgcagccacagcttccgggagggcctgtgccggctgctggagctcacccgcagacccatcttcatcaccttcgagggccagaggcgcgaccccgcgcacccggcgctccgcctgctgcgccagcaccgccacctggtgaccttgctgctctggaggcccggctccgtgactccttcctccgatttttggaaagaagtgcagctggcgctgccgcggaaggtgcggtacaggccggtggaaggagacccccagacgcagctgcaggacgacaaggaccccatgctgattcttcgaggccgagtccctgagggccgggccctggactcagaggtggacccggaccctgagggcgacctgggtgtccgggggcctgtttttggagagccatcagctccaccgcacaccagtggggtctcgctgggagagagccggagcagcgaagtggacgtctcggatctcggctcgcgaaactacagtgcccgcacagacttctactgcctggtgtccaaggatgatatgtagctcccaccccagagtgcaggatcatagggacagcgggggccagggcagcggcgtcgctcctctgctcaacaggaccacaacccctgccagcagccctgggaccctgccagcagccctgggaaaaggctgtggcctcagggcgcctcccagtgccagaaaataaagtccttttggattctaaaaaaaaaaaaaaaaaaaaaaaaaaaaa

SEQ ID NO: 98 - DNA, 1480 bp, Homo sapiens
ggcacgaggcgtggagagcggagcgaagctggataacaggggaccgatgatgtggcgaccatcagttctgctgcttctgttgctactgaggcacggggcccaggggaagccatccccagacgcaggccctcatggccaggggagggtgcaccaggcggcccccctgagcgacgctccccatgatgacgcccacgggaacttccagtacgaccatgaggctttcctgggacgggaagtggccaaggaattcgaccaactcaccccagaggaaagccaggcccgtctggggcggatcgtggaccgcatggaccgcgcgggggacggcgacggctgggtgtcgctggccgagcttcgcgcgtggatcgcgcacacgcagcagcggcacatacgggactcggtgagcgcggcctgggacacgtacgacacggaccgcgacgggcgtgtgggttgggaggagctgcgcaacgccacctatggccactacgcgcccggtgaagaatttcatgacgtggaggatgcagagacctacaaaaagatgctggctcgggacgagcggcgtttccgggtggccgaccaggatggggactcgatggccactcgagaggagctgacagccttcctgcaccccgaggagttccctcacatgcgggacatcgtgattgctgaaaccctggaggacctggacagaaacaaagatggctatgtccaggtggaggagtacatcgcggatctgtactcagccgagcctggggaggaggagccggcgtgggtgcagacggagaggcagcagttctgggacttccgggatctgaacaaggatgggcacctggacgggagtgaggtgggccactgggtgctgccccctgcccaggaccagcccctggtggaagccaaccacctgctgcacgagagcgacacggacaaggacgggcggctgagcaaagcggaaatcctgggtaattggaacatgtttgtgggcagtcaggccaccaactatggtgaggacctgacccggcaccacgatgagctgtgagccccgcgcacctgccacagcctcagaggcccgcacaatgaccggaggaggggccgctgtggtctggccccctccctgtccaggccccgcaggaggcagatgcagtcccaggcatcctcctgcccctgggctctcagggaccccctgggtcggcttctgtccctgtcacacccccaaccccagggaggggctgtcatagtcccagaggataagcaatacctatttctgactgagtctcccagcccagacccagggaccctggccccaagctcagctctaagaaccgccaccaacccctccagctccaaatctgagcctccaccacatagactgaaactcccctggccccagccctctcctgcctggcctggcctgggacacctcctctctgccaggaggcaataaaagccagcgccgggaaaaaaaaaaaaaaaaaaaaaaaaaaaa

SEQ ID NO: 99 - DNA, 2594 bp, Homo sapiens
ccggcttccgagcacagcatggcggtcaaggtgcagacaactaagcgaggggatcctcatgagttaagaaacatatttctacagtatgccagtactgaggttgatggagagcgttacatgaccccagaagactttgttcagcgctatcttggactgtataatgatccaaatagtaacccaaagatcgtgcagctcttggcaggagtagctgatcaaaccaaggatgggttgatctcctatcaagagtttttggcatttgaatctgttttatgtgctccagattccatgttcatagtggctttccagttgtttgacaagagtggaaatggagaggtgacatttgaaaatgtcaaagaaatttttggacagactattattcatcatcatatcccttttaactgggattgtgaatttatccgactgcattttgggcataaccggaagaagcatcttaactacacagaattcacgcagtttctccaggagctgcaattggaacatgcaagacaagcctttgcactcaaagacaaaagcaaaagtggcatgatttctggtctggatttcagtgacatcatggttaccattagatctcacatgcttactccttttgtggaggagaacttagtttcagcagctggaggaagtatctcacaccaggttagcttctcctacttcaatgcatttaactcgttactgaataacatggagcttgttcgtaagatatatagcactctagctggcacaaggaaagatgttgaagtcacaaaggaggaatttgcccagagtgccatacgctatggacaagtcacaccactagaaattgatattctatatcagcttgcagacttatataatgcttcagggcgcttgactttggcagatattgagagaatagccccattggctgagggggccttaccttacaacctggcagaacttcagagacagcagtctcctgggttaggcaggcctatctggctccagattgccgagtctgcttacagattcactctgggctcagttgctggagctgtgggagccactgcagtgtatcctatagatctggtgaagacccgaatgcaaaaccagcgtggctctggctctgttgttgggagctaatgtacaaaaacagctttgactgttttaagaaagtcttgcgttatgagggcttctttggactctacaggggtctgataccacaacttataggggttgctccagaaaaggccattaaactgactgttaatgattttgttcgggacaaatttaccagaagagatggctctgttccacttccagcagaagttcttgctggaggctgtgctgaggctctcaggtcatttttaccaacccattggagatagtgaagattcgtctgcaagtagctggagagatcaccacgggacccagagtcagcgccctgaatgtgctccgggacttgggaatttttggtctgtataagggtgccaaagcgtgtttcctccgagacattcccttctctgcaatctattttcctgtttatgctcattgcaaactacttctggctgatgaaaatggacacgtgggaggtttaaatcttcttgcagctggagccatggcaggtgtcccagctgcatctctggtgacccctgctgatgtcatcaagacaagactgcaggtggctgcccgcgctggccagacgacatacagtggtgtcatcgactgtttcaggaagattctccgggaagaagggccctcagcattttggaaagggactgcagctcgagtgtttcgatcctctccccagtttggtgttaccttggtcacttatgaacttctccagcggtggttttacattgattttggaggcctcaaacccgctggttcagaaccaacacctaagtcacgcattgcagaccttcctcctgccaaccctgatcacatcggtggatacagactcgccacagccacgtttgcaggcatcgaaaacaaatttggcctttatctcccgaaatttaagtctcctagtgttgctgtggttcagccaaaggcagcagtggcagccactcagtgatgagacaactgttgagtgtggcaaaatggcgccttgaagaaagaggcctaggagagcagccctgtaatgtatccagtcagctgcatggtactgactgagctgaggagtcaaactcttctttctgtatgacatatacatatacttgtttataaaataatcatttgcccagggaaaaaaccacaacgctgtttcaagctttagtcttatgtgttgaaatgtttttgtaagccttggcatgaattagtgttctagactctgctttgcacagcttgcacttacagtgattgtacatattgtacatctttgtacagagacatcttggcacctcatcccaacaaatcacatttgtagaaatgtaatgcggttctgagtggcttgaaatgtacagaatgttttgaaagtgttttattaagaatcacacaaaaataaatgtattaaaattaaattcattctcttattggtgacttatggaaataaagcctcaatattggatgtttttaaaaaaaaaaaaaaaaaaaaaaaaaaaaaaaaaaaaaaaaaa

SEQ ID NO: 100 - DNA, 1104 bp, Homo sapiens
gagaattcctgagttttgctgatgacttactctctggcctgggcacatcttgtgtagcasctggtcgaagccatrgagaggtccctgaagtcagtatctactcagtcatcttcaagtgtctggagcccgacggtctctacaagttcactctgtatgctgtggatacacgagggaggcactcagagctaagcacggtgaccctgaggacggcctgtccactggtagatgacaacaaggcagaagaaatagctgacaagatctacaatctgtacaatgggtacacaagtggaaaggagcagcagatggcctacaacacactgatggaggtctcagcctcgatgctgttccgagtccagcaccactacaactctcactatgaaaagtttggcgacttcgtctggagaagtgaggatgagctggggcccaggaaggcccacctgattctacggcgactggagagggtgagtagccactgctccagcctcctgcggagtgcctacatccagagccgcgtggaaacagtgccctatcttttctgccgcagcgaggaggtccggcctgcaggcatggtgtggtatagcatcctcaaggacaccaaaatcacgtgtgaggagaagatggtgtcaatggcccgaaacacgtacggggagtccaagggccggtgagggagggtattgccctccgtgagcacagagactctccatgggagggggagcagtattctcctggatcctggggcctgggtgggctgggggacagctgaggatgggcctagcagatgaagcttgccagcaaggccaaagcaaacggtttctcctgtggatagtggacagagacctttgtaaccaatggaattattcatttttctctatcttttattttttcaaagatattatttgactctatmaaaagtctctcctttttaaaccttttcttatggatggctgtcaatcccaaggcagaagttttcaggtggagaccaagcggcctttgctcttcttccttcttcctgccacactctgctttcttcctgccatggacccctggaggagacctatggagggacagttttgacctgacccctagaggagacagttttgacct

SEQ ID NO: 101 - DNA, 441 bp, Homo sapiens
  misc_feature (14): n equals a,t,g, or c
  misc_feature (35): n equals a,t,g, or c
  misc_feature (62): n equals a,t,g, or c
  misc_feature (117): n equals a,t,g, or c
aaaattagtgcagnggagaaaacaatttttaatgnaatcttgattttacctcatatactgtncattccaaaaactctaaactttttaaagattatagatacactaccaaacatatcnccttaaaattgtataaggctgaatgaacttcatacaaatgaaaaaaatctcataaaaatacataaactatgtagcaaaagtatctgtaaaatccatggaaaataaaagttgtatcattctttttgagatacgtttattgtattcatatatattcattatttgctacctgtttaagaaagtgaaatgttatggtctcccctcttccaatgagcttaaaacatttttcccaacagtatataaatcttcaacatgagaggatgtatatttattatataaagcccagtaaagaataaaattagaagttttatcctagtaaaaaaaaaa

SEQ ID NO: 102 - DNA, 1407 bp, Homo sapiens
tttccgmggcgccttctccccggccactgcttgagccgctgagagggtggcgacgtcggggccatggggctgggcccggtcttcctgcttctggctggcatcttcccttttgcacctccgggagctgctgctgagccccacagtcttcgttataacctcacggtgctgtcctgggatggatctgtgcagtcagggtttcttgctgaggtacatctggatggtcagcccttcctgcgctatgacaggcagaaatgcagggcaaagccccagggacagtgggcagaagatgtcctgggaaataagacatgggacagagagaccagggacttgacagggaacggaaaggacctcaggatgaccctggctcatatcaaggaccagaaagaaggcttgcattccctccaggagattagggtctgtgagatccatgaagacaacagcaccaggagctcccagcatttctactacgatggggagctcttcctctcccaaaacctggagactgaggaatggacagtgccccagtcctccagagctcagaccttggccatgaacgtcaggaatttcttgaaggaagatgccatgaagaccaagacacactatcacgctatgcatgcagactgcctgcaggaactacggcgatatctagaatccrgcgtagtcctgaggagaacagtgccccccatggtgaatgtcacccgcagcgaggcctcagagggcaacatcaccgtgacatgcagggcttccagcttctatccccggaatatcatactgacctggcgtcaggatggggtatctttgagccacgacacccagcagtggggggatgtcctgcctgatgggaatggaacctaccagacctgggtggccaccaggatttgccgaggagaggagcagaggttcacctgctacatggaacacagcgggaatcacagcactcaccctgtgccctctgggaaagtgctggtgcttcagagtcattggcagacattccatgtttctgctgttgctgctgctgcgctgctatttttgttattattattttctatgtccgttgttgtaagaagaaaacatcagctgcagagggtccagagctcgtgagcctgcaggtcctggatcaacacccagttgggacgagtgaccacagggatgccacacagctcggatttcagcctctgatgtcagctcttgggtccactggctccactgagggcrcctagactctacagccaggcggctggaattgaattccctgcctggatctcacaagcactttccctcttggtgcctcagtttcctgacctatgaaacagagaaaataaaagcacttatttattgttgttggaggctgcaaaatgttagtagatatgaggcatttgcagctgtgccatattaaaaaaaaaaaaa

SEQ ID NO: 103 - DNA, 459 bp, Homo sapiens
  misc_feature (416): n equals a,t,g, or c
  misc_feature (450): n equals a,t,g, or c
  misc_feature (455): n equals a,t,g, or c
ggcagaggttttttgttccaagagagaagtgaagaatgtagttttcaaccaaagggatgacagctgatgagtgggctgagaaaatgcccaaaggcccgccgcctacctctcccaaggccacagccracagagacatcctggctcgcctccacaaagcagtgacttcccattaccatgccatcacccaggagtttgagaattttgacaccatgaaaacgaacaccatctccagagaggagtttagggccatttgtaatcgccgygtccaaatcctgacggacgaacaktttgacagaytctggaacgrgatgccakcaatgccaaggggargcttgaatacccggayttctgacaaggtcagttccagacagagcacaccaatggcactgggactcggcgggccaaaaggacagtgnctgcgctcgaagacaattgcttatgcatagactnacagnaagc

SEQ ID NO: 104 - DNA, 575 bp, Homo sapiens
  misc_feature (20): n equals a,t,g, or c
  misc_feature (53): n equals a,t,g, or c
  misc_feature (518): n equals a,t,g, or c
aaaataagtaagtgtgacantaaccggtaccggcaattcccgggtcgccccangcgtccgggggaactgatggcgttcctgttacctctcatcattgtgttaatggtgaagcacagcgattcccggacgcactctctgagatattttcgcctgggcgtttcggatcccatccrtggggtccctgaatttatttcggttgggtacgtggactcgcaccctatcaccacatatgacagtgtcactcggcagaaggagccacgggccccatggatggcagagaacctcgcgcctgatcactgggagaggtacactcagctgctgargggctggcagcagatgttcaaggtggaactgaagcgcctacagaggcactacaatcactcagggtctcacacttaccagagaatgattggctgtgagctgctggaggatggaagcaccacaggayttctgcatatgcatatgacgggcaggatttcctgatcttcaataaagacaccytctcctggytgtcgtanaaaagtgggctcacaccatcaagcaggcttgggaaggccatccagctggattgccgt

SEQ ID NO: 105 - DNA, 596 bp, Homo sapiens
  misc_feature (565): n equals a,t,g, or c
attcggcacgagcccgccccccaaaagaagcggagatttaacggggacgtgcggccagagctggggaaatgggcccgcgagccaggccggcgcttctcctcctgatgcttttgcakaccgcggtcctgcaggggcgcttgctgcgttcacactctctgcactacctcttcatgggtgcctcagagcaggaccttggtctttccttgtttgaagctttgggctacgtggatgaccagctgttcgtgttctatgatcatgagagtcgccgtgtggagccccgaactccatgggtttccagtagaatttcaagccagatgtggctgcagctgagtcagagtctgaaaggtgggatcacatgttcactgttgacttctggactattatggraaatcacaaccacagcaaggrgtyccacaccctgcagtcatcctggggctgtgaaatgcaagaagacaacagtaccgagggctactggaagtacgggtatgatgggcaggaccaccttgaattctgccctgacacactggattggagagcagcagaacccagggcctggcccaccaanctggagtgggaaaggcacaagattcgggcca

SEQ ID NO: 106 - DNA, 514 bp, Homo sapiens
aattcggcagagcggctcagcgacgccacggccagcagcgctcgcktcctccccagcaacagttactcaaagctaatcagatagcgaaagaagcaggagagcaagtcaagaaatacggtgaaggagtccttcccaaagttgtctaggtccttccgcgccggtgcctggtcttcgtcgtcaacaccatggacagctcccgggaaccgactctggggcgcttggacgccgctggcttctggcaggtctggcagcgctttgatgcggatgaaaaaggttacatagaagagaaggaactcgatgctttctttctccacatgttgatgaaactgggtactgatgacacggtcatgaaagcaaatttgcacaaggtgaaacagcagtttatgactacccaagatgcctctaaagatggtcgcattcggatgaaagarcttgctggtatgttcttatctgargwtgaaaactttcttctgctctttcgscgggaaaaccactggacaagcagcgtggagtt

SEQ ID NO: 107 - DNA, 1560 bp, Homo sapiens
  misc_feature (3): n equals a,t,g, or c
  misc_feature (1523): n equals a,t,g, or c
agnctggaagtcctggatgccagagacccattaggctgccgctgcttccaaatggaggaggctgtcctgcgagcacaaggcaacaagaagctggtcctggtcttgaacaagattgacctggtccccaaggaggttgtggagaaatggctggattaccttcggaatgagttgccaaccgtggctttcaaggccagtacccagcatcaggtcaaaaacctgaatcgttgcagtgtgccagtagatcaggcctctragtcactgctgaaaagcaaagcctgctttggagctgaaaacctcatgagggttctggggaactattgccgccttggtgaagtgcgcacccacattcgtgtgggtrttgtgggtcttcccaatgttgggaagagcagcctgatcaatagcctgaagcgcagccgcgmrtgcagcgtgggagctgttcctggaattaccaaattcatgcaggaggtctacctggacaagttcatccggctcttggatgctccaggcattgtcccagggcccaactcagaggtgggcaccatcctgcgtaactgcgtccacgtgcagaagctggcagaccctgtgaccccagtggagaccatcctgcagcgctgcaacctggaggagatttccaactattatggcgtctctgggttccagaccactgagcactttctgacggcagtggcccaccgtttggggaagaagaagaagggaggcttatatagtcaggaacaggcggccaaagctgtcctagctgactgggtgagcgggaagatcagcttctatataccaccaccagccactcacactctgcccacccatctcagtgctgagatcgttaaggaaatgaccgaggtctttgacatcgaggatactgagcaggccaatgaagacaccatggaatgcttggccaccggagaatctgatgagctgttgggtgacacggacccacttgaaatggagatcaagttgctccattctccgatgacgaaaatagcagatgccattgaaaataaaaccaccgtgtataagattggagatctcactgggtattgcaccaatccgaaccgtcatcagatggggtgggctaaacgcaatgtggaccaccgccctaagagcaacagtatggtggatgtctgctcagtggaccgccgctcagtgctgcagaggatcatggagacggaccccctgcaacagggccaggctctggcatctgccctgaaaaataagaagaagatgcagaaacgtgcagataaaatcgccagcaagctgtctgattccatgatgtctgctctcgacctctctggcaatgctgatgatggtgttggtgactaatcgactgatctcacttcccttccgctccaagcaccagttccggtggtacgggggaataccagtgaaatagtttggttctccctgaagcatctgcatattgaaagaacgctttccccactgtgtgtcttctccccctcctccagtaaaaacagtcccggctaggtgctgtggctcacgtctgtaantcccagcactttggggaggccgaggtggggcagatca

SEQ ID NO: 108 - DNA, 886 bp, Homo sapiens
  misc_feature (808): n equals a,t,g, or c
ggttttgtgtcaggtcagtcagcgaggctggggtaggcgagagctcagccgccaccgagcccatcagggtcaagcaggctctggctaccccgtctgccccatatggctttgccctcctgaactgcgggaagaatgaaatggtcattgggtggaaaccccccaagcgtcgtggaggtggcaagatcctgggctacttcctggaccagcatgactcggaagagctggactggcatgcggtsratcagcagcccatccccacccgggtctgcaaggtcagtgaccttcatgaaggccacttctatgagttccgtgcccgggctgccaactgggcaggtgttggcgagctgtcggcacccagcagcctgtttgagtgcaaagagtggacaatgccccagccaggccccccgtacgatgtacgggcatccgaggtgcgggccacatccctggtgctgcagtgggaacccccactgtatatgggggctgggcctgtcacaggctatcacgtcagtttccaggaggaaggctctgagcagtggaagccggtcacctcaggccccatctctggcacccacctgagggtttccgacttgcagccaggaaagagttacgtgttccaggtacaggccatgaattcagctggtctggggcaaccgtccatgcccactgatcccgtgctcctggaggacaagccaggtgcccatgagatcgaggttggtgtggatgaagagggctttatctatttggcttttgaagcccctgaagccccgagtcctcagagttcagtgggtccaaaagaatacaaagggcncaatggaaccccagagggtcaagatcgaaggtaaagttaacaagtccaaggtcatctgaaaaaaaccgggctcgagga

SEQ ID NO: 109 - DNA, 505 bp, Homo sapiens
  misc_feature (383): n equals a,t,g, or c
  misc_feature (384): n equals a,t,g, or c
  misc_feature (456): n equals a,t,g, or c
  misc_feature (464): n equals a,t,g, or c
  misc_feature (474): n equals a,t,g, or c
ggcacgagccaccatggccacggacgagctggccaccaagctgagccggcrgctgcagatggagggcgagccccagtcgcccagccgccgcgtcttcaacccctacaccgagttcaaggagttctccaggaagcagatcaaggacatggagaagatgttcaagcagtatgatgccgggcgggacggcttcatcgacctgatggagctaaaactcatgatggagaaacttggggcccctcagacccacctgggcctgaaaaacatgatcaaggaggtggatgaggatttgacagcaagttgagcttccgggattcctcctgatcttccgcaaggcggcggccggggagtttcaggaggacagcgggttgtgcgtgttggcccgnntttttgagatcgacgttttccattgagggtttcaaagggggccaagagttttttttgaggccaagttccagncatcaaantgttccagcnttttgaggagggatcaaagcagagcaggagg

SEQ ID NO: 110 - DNA, 902 bp, Homo sapiens
ggacggggatcctgatgctctcaccccaccctccgctgcctctgcttctgccaaggtggccgacactgggccccctaccgaccgtggcgtccaggtgactgagcacggggccacagctgctcttgtccagtggccggatcagcggcctatcccgggcatccgcatgtaccagatccagtaccaacagctcggctgatgacatcctcgtctacaggatgatcccggcggagagccgctcgttcctgctgacggacctggcgtcaggccggacctacgatctgtgcgtgctcgccgtgtatgaggacagcgccacggggctcacggccacgcggcctgtgggctgcgcccgcttctccaccgaacctgcgctgcggccatgcggggcgccgcacgctcccttcctgggcggcacgatgatcatcgcgctgggcggcgtcatcgtagcctcggtactggtcttcatcttcgtgctgctaatgcgctacaaggtgcacggcggccagccccccggcaaggccaagattcccgcgcctgttagcagcgtttgctcccagaccaacggcgccctgggccccacgcccacgcccgccccgcccgccccggagcccgcggcgctcagggcccacaccgtggtccagctggactgcgagccctgggggcccggccacgaacctgtgggaccctagccaggcgcccccccctctaagggtcctctggccccacggacagcaggacccggacaccctgtgggacctggcctcaaactcaccaaatcgctcatggtttttaaaactctgatggggagggtgtcggggacaccggggcaaaacaagaaagtcctatttttccaarmttgggcgaaacaaaaaaaaaaaaaaaaaaaaaaaaaaaaaaaaaaaaaa

SEQ ID NO: 111 - DNA, 208 bp, Homo sapiens
  misc_feature (61): n equals a,t,g, or c
  misc_feature (62): n equals a,t,g, or c
ggcagagccccgagccctcctcctgctgctctcgggaggcctggccctggccgagaccttnntctgcccccactccatgaggtatttcgacaccgccgtgtcccggcccggcgcggagagcccygcttcatctcagtgggctacgtggacgacagcattcgtgcggttcgacagcaacgccgcgagttccgagaaggggagccgcggg

SEQ ID NO: 112 - DNA, 2613 bp, Homo sapiens
  misc_feature (1215): n equals a,t,g, or c
ggggcagtgggtaggaagtgagacactggaggccaaatggctttgcctgttattttagaagcagagtcgcggggagatggtctggtggatgtgatgtgggaatataagtgggagaacacgggggatgccgagctgtatgggcccttcaccagcgcccagatgcaggtgagctgctttctccctcctcctgccttgtccctgcttcccccactcctgtcagttgttccccagctctgccctctccttgcagacctgggtgagtgaaggctacttcccggacggtgtttattgccggaagctggacccccctggtggtcagttctacaactccaaacgcattgactttgacctctacacctgagcctgctgggggcccagtttggtgggcccttctttcctggactttgtggaggaggcaccaagtgtctcaggcagcgaggaaattggaggccatttttcagtcaatttccctttcccaataaaagcctttagttgtgtactggggccttggctgtgctgatggccagaagccaggggccttctccacagtccctttggacttgtcttggtccctgagtactcccatgaagatccttcttggaggtgcctgtcaggtatcctgtggsctccctgcctggactctgcttgccgtgtaaacacccccaactgcgctgctctgtgctcctctcccaggtttcttgttcgattcctcttaggtctttggctttcaggacctcagattctttatccttgtagccaccagaggacagagccccagaagtggatgttttaggcccagaaggaccagggcatcgagaagacattgggaccctgttgggggtgagcatggaaccctcttactctcgcttcaccctctcaagctccttagatgctgggcagaagtgggatgagtggcccaagaccgagatccctaaggttctgagagccagtgtcttccctaatctggctttcctctatccttgccgtcgttcccacagcccttcagtgaagtgcaaactcagtggccaagtgtgggccaagtgtgcattgtactggcacagagaggggcagtgactcactggagatcacaggaatcaaagggctggcccagacccagtgggctcctttcccagacctttcttggcacaaagcctttgctgcctggccttggaggcctgcggctacattctctggaccccactatgtgcctggcanagggctagtgccttgaggaaactgaggtagctgggttggtccccttccaggaattcagagtctggtggcaggggcatgggaaatagacagatgtaattctatagcctgggcctggcaccctccacctccacgccccaccagcattgccttacgcctcccwtgccccacgttagatggtttcttccggttttgcactctggctgccccttggagtctcctggggagctgtaatatctctttggagattcagattgagctggtctaggttgtggcccaggcattgggcattttggaagcccccaggtgttttcagcttgcagccaggccgagagagagcccctgagtcagatccccatggtttaggcacacctagcgggaggggtggctcctggaccccaccgtggttggagagctgagcatgtgtgtggctttagtggggtctgttagttatgggggtctgggcactggagctgcaggacacttgggatcccaggtcagaaagggccagatgagcaactaggaaagacttgggggccagggcggagtggggtcacctgacactcttgtgaggccccttctagtgcctgctcacaccggaatttcattcactccaagaagccatcaggggtaagataccttcctttaaacgtcactaagaaagaagaggcctgccggtgacacagtaagatgccattgatctaaagatgcgtcttgatttcagaaaggtccggaagtggaaagcaggtttcagggctgctgaggtacagggttctcctgtaggccccagggatggtctcaggggtgctgagtgcgtgcgtggtaaatggatggagcccaggggcgcctcctgccagtgtcctccaggcactcaaacctagcccttctgaagccgacctcacgtgacctcacagcccctcctgaaggcgcctcactgatgacggtgggtggaataacagcccccagagatgtccaggtttggaaccccaggacgtgggaaagtgttaccttgcgtggcaaaagggacccggcgcctgtgcttcagttcaggatttcgtggtggggagatgaccgtggatggttgaggtgggccctgagtaatcatgggggcccttataagggaaggggagtcacgagggtctgcgcatgaagcaaggaagcttctggctgtgaagatggcaagaaggcctggggccaggcgatgaggtggcccctggaggagctggaaaaggcattggattctgccccagagcctccgtggagaaacaaagccgcactgacaagacttcagcctggtgaaaaccattttggactcctgacctctagaactgtaagataataaattggtgtggttttcaacaaaaaaaaaaaaaaaaaaaaaaaaaaaaaaaaaaaaaaaaa

SEQ ID NO: 113 - DNA, 440 bp, Homo sapiens
  misc_feature (389): n equals a,t,g, or c
gggcgccccgaaccgtcctcctgctgctctcggcggccctggccctgaccgagacctgggccggctcccactccatgaggtatttctacacctccgtgtcccggcccggcgcggggagcccccttcatctcagtgggctacgtggacgacacgcattcgtgaggttcgacagcracgccgcgagtccgagagaggagccgcgggcccgtggatagagcaggaggggccggaatattgggaccggaacacacagatctgcaaaccaacacacagacttaccgagagaacctgcggattcgcgsttccggttacttacaaccagagcgaaggccgggttttcacaccctccagaggatgttacgggttgcaacgtggggccggacgggcgncttcttccgcggggattaaccaatttggctacgacggcaagggttacatcg

SEQ ID NO: 114 - DNA, 745 bp, Homo sapiens
tacttcgcagcaccgaaagagcgtcgtccgatggttggcggtatgctgctttctgttgctgttactgcgtacgccgattatcgatctggcgctgcatattgttggcggtagtgaggcagtcctggaacaggcgcggcgctttcttgaaatccgctggttaagcgcaccggcgtcgctggcgaatctggtattactcggttggttactcggcgtgcaatatgcccgtgcgccagtaattttgttagtggtcggcaatatcctcaacattgtgctggatgtctggctggtgatggggctgcatatgaacgtgcagggcgcggcgctggcgacggttattgcggaatatgcaacattgctgattggtctgctaatggtgcgtaaaatcctcaaactacgcggaatttcgggcgaaatgctgaaaactgcctggcgaggaaacttccgtcgcttgctggcgcttaaccgcgatatcatgctgcgttcgctgttgttgcaactctgtttcggcgcgatcaccgtacttggcgcgcgactggggagtgacattatcgctgttaacgcggttctgatgacgctactcacctttaccgcctatgcgctggatggttttgcctacgcggttgaagcgcactccggtcaggcatacggtgcgcgcgacggtagccagttgctggatgtctggcgggcagcgtgccgccagtcggggatcgtagcgttactgttttcggtggtttatttgctggct

SEQ ID NO: 115 - DNA, 2108 bp, Homo sapiens
gcggcagtgggattactcagtgttgagagaaacaacacggaaagcccagagcagaggagggagaaggccccattctctcagctttaatctactgcacctcggagggcagagctctaaccagacacgctgcaagcatcagaatcgggatgaacatcgaggtggggaacatttcttatacaggagccatcatctcctggtcgtcctcggagccctgcctggaggactattaccatattatgtacaggcccaactggaacagcatcttctctggctatcttcgctacagcttccaccacgaggagaaggtgcctcgaacgatcagctccgtggtgctggaacatcttgcccctyccactctctacttcctgtgcatcagctgtaagaaggctgccttcccttacaggcactactgcaccatgttccacaccctggataagagtccgctggctcctggaagctccctggtagacccccagatctccctttgggtgctgatggccattctgctggcctgcttcacagccgtcttggccttcatctgcctccagttctggtgtgtccgttgccatgagccgcgatggtcttacagggctggccacatggaggaggccaatgggttggtgagatggccagaggaggccccggatcttggtcagagggaggaagacctgcaggggctccccctggtggaaatgccacgcaagaactccagagatggagctgaactggatcccgaagccaaccaggatgcccctgatgcgggtgccttacagagggggggtggtgacccacccgctatactgcctcattgtggggaatgagagtggggaggagagcgcccgcatcatgtagcctaaagctttccacacagtaggtcgtttgtacaaatgtgtctatagactacccatttctctcccatcaaacgtcactgctattgtaggtcacctgggttggatgaatgccccatgacaaagcttctcaagctggaaaatgtatcccccagggtatgccaaggcacaaacgaggcatctcagcagcagcgtccactcggaggacacagttaagaattgaaagcattgttttaacattaaaacaaacatggatatgttataaagtagaaagcaaaaatttgcatgacttaaataaaacacagcacttgaaggaaacacttgagttacaagtaggctctcagaggtacacttttgggcaaaggtagatgtccagtttcctctgcccttgaggggattatttggaaataatttgggattatttggaaataatttgtgagaacccttgctctggagtgttttccaacttttaggcaatcacataccaccgctctctattttttaaaaccatggattatcttcactattattaataatactttcctttaaattgactcattttttaagcgtaaacttattttcaaagacagccttatattactccataagtgaaaaaccagcaccctcctgctgcaaacagaagggaagagacataagaataaacatcatgaaaacaagataatattaaataatctgacttagcttctattgcctgccagtgattctgagcttaatgcctgcttgcttgtctttgataaaaagggagatccagtgttggagaggtaataaagacatattagcaccaatatttgtctttctccttgatatagcataagrtttgaaagagaatcgaaaagggaagtgctgtttttactttgcgagtcagtgttagttaaatgccatgtctgtgaaccacctcaaatgctgtcagtcagcttcccttgatttgagaaaattgtcttgaccagactaggcaggctgttctggagaagacgcctgtactctccaagcatcatccaagaccttcccagtaccctcttatatctatagagcacaaaatcccagaatcacaggacgacactgcagtgaatcaactaagaaacagcaggagctgagaagccaagacgagaagccccacatccctattcccttgcctacctcatgcattccctgctcggcacccagacttttgcccccattcctgctacttgtgaacaaataaagattcatatactcaaaaaaaaaaaaaaaaaaactcga

SEQ ID NO: 116 - DNA, 184 bp, Homo sapiens
  misc_feature (106): n equals a,t,g, or c
ccgagtgaacctgcggaaactgcgcggctactacaaccagagcgaggacgggtctcacaccctccagasgatgtwtggctgcaacctggggccggacgggcgattnctccgcgggcataaccagttagcctacgacggcaaggattacatcgccctgaacgaggacctgagctcctggtaccgc

SEQ ID NO: 117 - DNA, 1313 bp, Homo sapiens
ggaacaattcaggcttcgctgcgactcagacctcagctccaacatatgcattctgaagaaagatggctgagatggacagaatgctttattttggaaagaaacaatgttctaggtcaaactgagtctaccaaatgcagactttcacaatggttctagaagaaatctggacaagtcttttcatgtggtttttctacgcattgattccatgtttgctcacagatgaagtggccattctgccygcccctcagaacctctctgtactctcaaccaacatgaagcatctcttgatgtggagcccagtgatcgcgcctggagaaacagtgtactattctgtcgaataccaggggtgagttttttcttttaatagttcttctcccttaagcagaagttggttcctgaaggcatagcccttcctcctgagcccaaggtggctttttgagtccagggatagattatccccaaagatctaccccctctgtctgcataggcattgaaagagttgaagaagcaagggaaattgttctgtggatttgacagtgaactctctgggaagatgaatgtgcataacacattttggtggagttattttaaaaagtgaatcaactgtccaatgggtttgactctgacttgagatggataaatcactggagactcagatcctttaagggtggaggagtcctcacttttcctgactataagcttatacctagagccaaaacgaactataatcctaaaggtcagctggccctggggctgagcaggctgtaccaaggtccctgagccaggttgtaycaagktycctgagccaggctgccaycaaagttcctgagcaaggatacaccaaagttcctgtgccaggctacacaaagstaccagagccatgtccttcaacggtcactccaggcccagctcagcagaagaccaagcagaagtaatttggtgcacagacaagcccttgagaagccaaccaccagatgctggacaccctcttcccatctgtttctgtgtcttaattgtctgtagaccttgtaatcagtacattctcaccccaagccatagtctctctcttatttgtatcctaaaaatacgtactataaagcttttgttcacacacactctgaagaatcctgtaagcccctgaattaagcagaaagtcttcatggcttttctggtcttcggctgctcagggttcatctgaagattcgaatgaaaagaaatgcatgtttcctgctctgccctcattaaattgcttttaattccaaaaaaaaaaagtcgacgcggccgcgaatttagtagtagtagtaggcggccgc

SEQ ID NO: 118 - DNA, 663 bp, Homo sapiens
  misc_feature (55): n equals a,t,g, or c
  misc_feature (555): n equals a,t,g, or c
  misc_feature (561): n equals a,t,g, or c
  misc_feature (587): n equals a,t,g, or c
  misc_feature (656): n equals a,t,g, or c
  misc_feature (658): n equals a,t,g, or c
ggcacgagcagaaacctcctcaacgcactcagaatctcctgtggttgtggacctnccggacacccccttcatctttaagcacaccgtcaacaattccacagctgtratttcctggacctacgccttgggcaagcarccggtcagtttctaccagcycctgttacaggaggtggccaagacacaggagaatgagttgcccgaggcaaagaatcgtccatggatcttcaacaagattttgggcactactgtcaagctgatggagctaaagcctwacacgtgttactgcctcagtgtccgtgcagccaacacagctggggtggggaagtggtgcaagccctacaaatttgcaaccctggccactgacttcagcagctttcctgagaactaccccatccagatcaccgtgcggcgcaaggaaccccggcaaaagatcgtgtcatcgggcccggaggagatgccggaggctggaggatctggaatacctatttcctggtaagggggagggccccaggacacccctaactactttcagcttcaacccaggcccttaaaaancagaanccttgagacctaacattccaaccagnaaccttgcgggccccggggtctggcaaaatgggattgggcacccaaaccctgggcttggggcccaaggntncataa

SEQ ID NO: 119 - DNA, 535 bp, Homo sapiens
  misc_feature (507): n equals a,t,g, or c
  misc_feature (509): n equals a,t,g, or c
  misc_feature (526): n equals a,t,g, or c
tcgacccacgcgtccggcgggtcacggcgccccgaaccctcctcctgctgctctggggggcagtggccctgaccgagacctgggccggctcccactccatgaggtatttctacaccgccatgtcccggcccggccgcggggagccccgcttcatcaccgtgggctacgtggacgacacgctgttcgtgaggttcgacagcgacgccacgagtccgaggaaggagccgcgggcgccatggatagagcaggaggggccggagtattgggaccgggagacacagatctccaagaccaacacacagacttaccgagagaacytgcgcaccggcttccgstamtacaaccagagcgaggccgggtctcacatcatccagaggatgtacggytgcgacktggggccggacgggsgcttctccgcgggtattkaccaggacgcttacgacggcaaagattacatcgcccttgaacgaagacttgagtcctggacgcgcggacacggggtcagtnanccaggcaattggagcgncctttgcga

SEQ ID NO: 120 - DNA, 658 bp, Homo sapiens; identical to SEQ ID NO: 18
  misc_feature (60): n equals a,t,g, or c
  misc_feature (88): n equals a,t,g, or c
  misc_feature (93): n equals a,t,g, or c
  misc_feature (619): n equals a,t,g, or c
  misc_feature (621): n equals a,t,g, or c
  misc_feature (634): n equals a,t,g, or c

SEQ ID NO: 121 - DNA, 1048 bp, Homo sapiens
  misc_feature (491): n equals a,t,g, or c
  misc_feature (1014): n equals a,t,g, or c
  misc_feature (1026): n equals a,t,g, or c
  misc_feature (1040): n equals a,t,g, or c
atgagatccggcagtttgcacggttcatgacagaaaagctgaacgtgagccacacaggagtccccctaggcgaggagtacattctggtctttagccgaacccagaacagactcattctgaatgaggcagagctgctgctggcactggcccaggagttccagatgaagacagtgacagtgtccctggaggaccacacctttgctgatgtcgtgcggctggtcagcaatgcctccatgctggtcagcatgcatggggcccagctggtcaccaccctcttcctgccccgtggggcaactgtggtagagctcttcccatatgctgtcaatcccgaccactacactccctataagacgctggccatgctgcctggcatggacctccagtatgtagcctggcggaacatgatgccagagaacacagtcacacaccctgagcggccctgggatcaggggggcatcacccatctggaccgggctgagcaagcccttatncctgcaaagccgtgaggtcccacggcatctctgttgccggaaccccgagtggctcttccgaatctaccaggacaccaaggtggacatcccatccctcattcaaaccatacggcgcgtggtgaagggccggccaggaccacggaagcagaagtggacagtcggcctatatccaggcaaggtgcgggaggcacggtgccaggcgtcagtgcatggcgcctccgaggcccgcctcactgtctcctggcagatcccatggaaccttaaatacctgaaggtgagggaggtgaagtacgaggtgtggctgcaggagcagggggagaacacctacgtgccttacatcctggctctgcagaaccacaccttcaytgagaacatcaagcccttcaccacctacctggtgtgggtccgytgcatcttcaacaagatcctcctgggacccttttgcagatgttgcttggtgttgcaaasgtagcgagcaggccacarcctggccttcggggaggttggtttcctgcattttcanggttccctgggnccattaattcccantttgggga

SEQ ID NO: 122 - DNA, 448 bp, Homo sapiens
  misc_feature (409): n equals a,t,g, or c
  misc_feature (448): n equals a,t,g, or c
ctaaagtctgcgaggaggaagtcgcctctgtgctcgtgagtccagggatctaagagccccacagtcttcgttacaacctcatggtgctgtcccaggatggatctgtgcagtcagggtttctcgctgagggacatctggatggtcagcccttcctgcgctatgacaggcagaaacgcagggcaaagccccagggacagtgggcagaagatgtcctgggagctaagacctgggacacagagaccgaggacttgacagagaatgggcaagacctcaggaggaccctgactcatatcaaggaccagaaaggaggcttgcattccctccaggagattagggtctgtgagatccatgaagacagcagcaccaggggctcccggcatttctactacggtggggagctcttgctctnccaaaacctggagattcaagattcgacaatgccccagtn

SEQ ID NO: 123 - DNA, 392 bp, Homo sapiens
ggcagaggtggtgcggccccttggagcgccggaagcccgcarwgccggagccgcagcgccggaacctcagaggcgggtcgcagcggcgcagaggagggctgaagaagatgcagagcagcctgaagctggtggactgtatcatcgaggtccacgatgcccggatcccactttcaggccgcaaccctctgtttcaggaaacccttgggcttaagcctcacttgctggtcctcaacaagatggacttggsggatcttacagagcagcagaaaattatgcaacacttagaaggagaaggcctaaaaaatgtcatttttaccaactgtgtaaaggatgaaaatgtcaagcagatcatcccgatggtcactgaactgattgggagaagccaccgctac

SEQ ID NO: 124 - DNA, 472 bp, Homo sapiens
  misc_feature (12): n equals a,t,g, or c
  misc_feature (219): n equals a,t,g, or c
  misc_feature (445): n equals a,t,g, or c
  misc_feature (464): n equals a,t,g, or c
gcacgtagtgtncactggaccccccaatgcgggcaagagcagcctagtgaacctgctcagtcggaagcctgtgtccatcgtgtccccggagccagggaccacccgtgacgtgctggagaccccagtcgacctggccggatttcctgtgctgctgagcgacacggctgggttgcgggagggcgtggggccgtggagcaggagggcgtgcggcgcgcccgnggagaggctagagcaggctgacctcattctggccatgctggatgcttctgacctggcctctccctccagttgcaacttcctggccaccgtcgtagcctctgtgggagcccagagccccagtgacagcagccagcgccttcctcctggtgctgaacaattcggacctgctktccccggaggcccaagttccggttctgactgccccgcaatgctgtgtctgtttganggaaagggttgaaggctcnggagcgtt

SEQ ID NO: 125 - DNA, 424 bp, Homo sapiens
  misc_feature (131): n equals a,t,g, or c
  misc_feature (362): n equals a,t,g, or c
  misc_feature (389): n equals a,t,g, or c
catgccttgccctgtcctgctgggccctgccctggacctgggctggagaaggatggaactcttgcaccggagcagcgagagaaccctgagctacgccaaggcgcggcaggagccggaaagagcagagcctncaaaagctttatcaaaaccgggagaagtccgaggagcaactgaccctgaagcaagaggaagccttccgcagctactttgagatcttcaatggtcctggtgaggtggatgcacagagcctgaagaatatcctgctcctaatgggcttctctgtgacgstggcccaggtggaggacgccctgatgagtgctgatgtcaatggagatggtcgtgtggacttcaaagacttcttngctgtgatgacagacaccaggcgcttnttctgctctgtggaacagaacgccctgtcggacat

SEQ ID NO: 126 - DNA, 616 bp, Homo sapiens
  misc_feature (612): n equals a,t,g, or c
ttaaatccactttaaaggatgaatcattgagcgtatatcatcttggaaaaagtcactcagcgtgatcttcgcaggaagtttgtttgctttgttccagaactccattggaaacacaacccagtccgtccaactgaaagaaaagagaggagtggtgctcctgtacatcctgcttggcaccatcgggaccctggtggccgtgctggcggcgagtgccctcctctacaggcactggattgaaatagtgctgctgtaccggacctaccagagcaaggatcagacgcttggggataaaaaggattttgatgctttcgtatcctatgcaaaatggagctcttttccaagtgaggccacttcatctctgagtgaagaacacttggcccwgagcctatttcctgatgttttagaaaacaawtatggatatagcctgtgtttgcttgaaagagatgtggctccaggaggagtgtatgcagaagacattgtgagcattattaagagaascaraagargaatatttatcttgagccccaactatgtcaatggacccagtatctttgraactacaagcagcagtgaatcttgccttggatgatscaaacactgaactgcattttnaatt

SEQ ID NO: 127 - DNA, 568 bp, Homo sapiens
  misc_feature (481): n equals a,t,g, or c
  misc_feature (536): n equals a,t,g, or c
  misc_feature (556): n equals a,t,g, or c
  misc_feature (562): n equals a,t,g, or c
actgatttgtccctggggcggcacgcggacccgcccggagatgaggcgtcgattagcaaggtaaaagtaacagaaccatggctcagtttccaacaccttttggtggcagcctggatatctgggccataactgtagaggaaagagcgacatgatcagcagttccatagtttaaagccaatatctggattcattactggtgatcaagctagaaactttttttttcaatctgggttacctcaacctgttttagcacagatatgggcactagctgacatgaataatgatggaagaatggatcaagtggagttttccatagctatgaaacttatcaaactgaagctacaaggatatcagctaccctctgcacttccccctgtcatgaaacagcaaccagttgctatttctagcgcaccagcattggtatggggaggtatcgccagcaagccaccgcttacagctgttgctccagtgccaatggggnccattccagttgttgggaatgtctccaaccctagtatcttctgttcccacagcantgtgccccccctggctaaanggggtncccctg

SEQ ID NO: 128 - DNA, 647 bp, Homo sapiens
  misc_feature (15): n equals a,t,g, or c
gctggttgggttgcnggggctcggttgttgtagtcgcgatgttcttctccgaggccagagccakgtcgcggacgtgggaagccagtccctcggaacacaggaagtgggtggaagtatttaaagcatgtgatgaagatcacaaaggatatctcagcagagaggactttaaaactgctgttgtaatgctgtttgggtacaagccctccaagatagaagtggattctgtgatgtcttcaataaatccaaatacttctggtatattactcgaggggtttttaaatattgtcaggaaaaagaaggaagctcaacgatatcggaaygaagtaagacacatcttcacagcctttgacacctactatcgtggatttttaactttggaagatttcaaaaaagcatttaggcaggtggctcccaaattaccggaaaggrstgttcttgaggtattcagggaagtagatcgagattcagatggtcacgtcagctttagagactttgaatatgccctgaactatggacagaaggaagcctaactattgtgaactacttttggtaactctggggagatcaatagattgtaatgtcagcagactckactctactaatgatgkcatgctacagacttgtgattaaacatttaaaaattttta

SEQ ID NO: 129 - DNA, 695 bp, Homo sapiens
  misc_feature (283): n equals a,t,g, or c
  misc_feature (540): n equals a,t,g, or c
  misc_feature (641): n equals a,t,g, or c
  misc_feature (683): n equals a,t,g, or c
gggaagcgtgaacccggtcctttccctttccgtccatcccagaccccgacttgctccgacacagccgctaggtcccagggagaaatcagctagtgattcccactttccgccctgtatcttgttcttcccccgcttgtttttgtgttcttgccccatgcctgatttctcgtcccccacccagggagcgagtcaaggccatgttctaccacgcctacgacagctacctggagaatgcctttcccttcgatgagctgcgacctctcacctgtgacgggcacgacanctggggcagtttttctctgactctaattgatgcactgggacacttgctgattttggggaatgtctcagaattccaaagagtggttgaagtgctccaggacagcgtggactttgatawtgawgtgaamgcctctgkgtttgaaacaaacattcgagtggtargaggactcctgtctgctcatctgctctccaagaaggctggggtggaagtagaggctggatggccctgttccgggcctgctcctgagaatggctgangaggcggcccgaaaactcctcccagagtataacaaagccatccggaactacacccgcttcgatggactggtacctgtgggttccagatgtacaaggggacngtgtccatggccagtcttccagtccttggaggcctactggcngggtgcttcaga

SEQ ID NO: 130 - DNA, 764 bp, Homo sapiens
  misc_feature (561): n equals a,t,g, or c
  misc_feature (626): n equals a,t,g, or c
  misc_feature (689): n equals a,t,g, or c
  misc_feature (723): n equals a,t,g, or c
  misc_feature (740): n equals a,t,g, or c
gccttactcgtatatttaaaatatctgatcaagataatgatggtactctcaatgatgctgaactcaacttctttcagaggatttgtttcaacactccattagctcctcaagctctggaggatgtcaagaatgtagtcagaaaacatataagtgatggtgtggctgacagtgggttgaccctgaaaggttttctctttttacacacactttttatccagagagggagacacgaaactacttggactgtgcttcgacgatttggttatgatgatgacctggatttgacacctgaatatttgttccccctgctgaaaatacctcctgattgcactactgaattaaatcatcatgcatatttatttctcaaagcacctttgacaagcatgatttggatagagactgtgctttgtcacctgawgagcttaaagattwatttaargttttcccttamataccttgggggccagatgtgaataacacagtttgtaccaatgaaaaaggctggataacctaccagggattcctttcccagtggacgctcacgacttatttagagtacancggtgcctggaatattgggctatctaggctatcaatattgactgagcaagagtctcaagctcacngttacagtgacaagagataaaaagatagacctgcagaaaaacaaactcaagaatgtgttcagngtaagtaatggagtggaaaacgtgggaaagtggnttctcaggcctctgganaactaatgggcgagaaatcgggag

SEQ ID NO: 131 - DNA, 624 bp, Homo sapiens
ccacaacggatgaagatgacagtgagtatgaggactgtccagaggaggaggaagacgactggcagacgtgctcagaagaagacggtcccaaggaagaggactgcagccaggactggaaggaaagctctactgcagattctgaggctcggagcaggaaaaccccacagaagaggcagatacacaattttagccatctggtatccaagcaggagttactggagctctttaaggagctacacactgggagaaaggtgaaagatgggcaacttacggtcggactggtgggctaccctaatgttggtaagagttcaacaatcaacaccatcatgggcaacaagaaagtatctgtgtctgccacacctggtcacacaaagcactttcagactctctatgtggagcctggcctctgcctgtgtgactgtcctggcttggtgatgccatcttttgtgtctaccaaggcagaaatgacttgcagcggaatcctcccaattgatcagatgagagatcatgttcctcctgtatcactaatawcctttctgctttggaaacactctagttattacgtgcatattagggcttcaggtttattttgggcatttgagggattcagatttgatgaagaat

SEQ ID NO: 132 - DNA, 1100 bp, Homo sapiens
  misc_feature (938): n equals a,t,g, or c
  misc_feature (1080): n equals a,t,g, or c
atcatcaacgttactaaatcagacgctgggagttatacctgtatagccactaaccattttggaactgctagcagtactggaaacttggtagtgaaagatccaacaagggtaatggtacccccttccagtatggatgtcactgttggagagagtattgttttaccgtgccaggtaacgcatgatcactcgctagacatcgtgtttacttggtcatttaatggacacctgatagactttgacagagatggggaccactttgaaagagttggagggcaggattcagctggtgatttgatgatccgaaacatccaactgaagcatgctgggaaatatgtctgcatggtccaaacaagtgtggacaggctatctgctgctgcagacctgattgtaagaggtcctccaggtcccccagaggctgtgacaatagacgaaatcacagataccactgctcagctctcctggagacccgggcctgacaaccacagccccatcaccatgtatgtcattcaagccaggactccattctccgtgggctggcaagcagtcagtacagtcccagaactcattgatgggaagacattcacagcgaccgtggtgggtttgaacccttgggttgaatatgaattccgcacagttgcagccaacgtgattgggattggggagcccagccgcccctcagagaaacggagaacagaagaagctctccccgaagtcacaccagcgaatgtcagtggtggcggaggcagcaaatctgaactggktataacctgggagacggtccctgaggaattacagaatggtcgaggctttggttatgtggtggccttccggccctacggtaaaatgatctggatgctgacagtgctggcctcarytgacgcctctagatacgtgttcaggaatgagagcgtgcacccttctctcctttgaggttaaantaggtgtcttcaacaacaaaggagaaggcctttcagtcccaccaggtggtgtattctgcagaagaagaacccaccaaaccaccagccatatctttgccagaagtctttctgccacagtattgaagttttctgggcctcccantggagaaggttagaggacgg

SEQ ID NO: 133 - DNA, 1104 bp, Homo sapiens
aaagatgggcaacttacggtcggactggtgggctacctaatgttggtaagagttcaacaatcaacrccatcatgggcaacaagaaagtatctgtgtctgccacacctggtcacacraagcactttcagactctctatgtgragcctggcctctgcctgtgtgactgtcctggcttggtgatgccatcttttgtgtctaccaaggcagaaatgacttgcagcggaatcctcccaattgatcagatgagagatcatgttcctcctgtatcactagtttgccagaatattccaagacatgttttagragctacctatggcattaacatcataacgcctagagaggatgaagatccccaccgacctccaacatcggaagaactgttgacagcttatggatacatgcgaggattcatgacagcgcatggacagccagaccagcctcgatctgcgcgctacatcctgaaggactatgtcagtggtaagctgctgtactgccatcctcctcctggaagagatcctgtaacttttcagcatcaacaccagcgactcctagagaacaaaatgaacagtgatgaaataaaaatgcagctaggcagaaataaaaaagcaaagcagattgaaaatatcgttgacaaaacttttttccatcaagagaatgtgagggctttgaccaaaggagtccaggctgtgatgggttacaagcccgggagtggtgtagtgactgcatccactgcgagctctgagaacggggcggggaagccctggaaaaaacatggcaacagaaataaaaaagaaaaaagtcgtagactctacaagcacctggatatgtgaggttgggctgcaacagaaatgtcatctgcattgtgcagatggaaaagagcagaagctgcctgttgcctgtggaactgtcccaagacactagcactgtagaacgggccctgctcttgcagagcacggctgcacccaacagtctccatgtcaagaccaagggcctcctggaaacaccaactctgacaaaaaggagtcatctgggagcccgagaatcctactcctggccgggcacagtggcacgcaccaacatggagaaaccccgtctytactaaaa

SEQ ID NO: 134 - DNA, 2034 bp, Homo sapiens
ggcacgagcggaggaggagcgggcgccatggcggttctactggagaccactttaggcgacgtcgtcatcgacttgtacaccgaagaacggccgcgtgcctgcttgaatttcttgaaactgtgcaaaataaaatattacaattattgccttattcacaatgtacagagggattttatcatacaaactggcgatcctacagggactggccgtggaggagagtctatctttggccaactgtatggtgatcaagcaagcttttttgaggcagaaaaagtcccaagaattaagcacaagaagaaaggcacagtgtccatggtgaataatggcagtgatcaacatggatctcagtttcttatcaccacaggagaaaatctagattatcttgatggtgtccatacggtgtttggtgaggtgacagaaggcatggacataattaagaaaattaatgagacctttgttgacaaggactttgtaccatatcaggatatcaggataaatcatacggtgattttagatgatccatttgatgaccctyctgatttattaatccctgatcgatcaccagaacctacaagggaacaattagatagtggtcgaataggagcagatgaagaaattgatgatttcaaaggaagatcagctgaggaagtagaagaaataaaggcagaaaaagaggctaaaactcaggctatacttttggagatggtgggagacctacctgatgcagatattaaacctccagaaaatgtactgtttgtgtgtaaattgaacccagtgaccacagatgaggatctggaaataatattctctagatttgggccaataagaagttgtgaagttatccgagactggaagacaggagagtccctctgttacgcttttattgaatttgaaaaggaagaagattgtgagaaagcattcttcaaaatggacaatgtgcttatagatgacagaagaatacatgtggattttagccagtcggttgcaaaggttaaatggaaaggaaaaggtgggaaatacaccaagagtgatttcaaggagtatgaaaaagaacaggataaaccacctaatttggttctgaaagataaagtaaagcccaaacaggatacaaaatacgatcttatattagatgagcaggccgaagactcaaaatcaagtcactcacacacaagtaaaaaacacaagaagaaaacccatcactgttctgaagagaaagaagatgaggactacatgccaatcaaaaatactaatcaggatatctatagagaaatggggtttggtcactatgaagaagaagaaagctgttgggagaaacaaaagagtgaaaagagagaccgaactcagaaccgaagtcgtagccgatctcgagagagggatggscattatagtaatagtcataaatcaaaataccaaacagatctttatgaaagagaaaggagtaaaaagagagaccgaagcagaagtccaaagaagtccaaagataaagaaaaatctaagtatagatgaaagatgaagaggcagaattgagaggctaacatatttactcttgtctaacttaagagtgccaggaaagcagatgcttagattttgtgtcaaagcttgttatttttttcatactaggattatggtctttagattaatactgattatatagagcacggaaagataaagaattgaacattttctttgtatacttttttacactaattttattgttatacataaatggtagtcttcatttttgaagtcttacattttcactctttttttaatgaagtatttcatactacaaaaatacataaacgtatatataaagggataataaatgtaaatatctgtgtactcatcagccagcttaagatacagatgttgtcgacattttagaagttccctaaggccctctccctctcaaataattatttggaattttgtgtttgtcatttgtctattatagttttacaacatacgtatgtatctgtaagtgaaatgttaattttgtatgtttctgaattttatataaatggcaaaatgttt

SEQ ID NO: 135 - DNA, 781 bp, Homo sapiens
  misc_feature (12): n equals a,t,g, or c
  misc_feature (691): n equals a,t,g, or c
  misc_feature (736): n equals a,t,g, or c
  misc_feature (739): n equals a,t,g, or c
  misc_feature (760): n equals a,t,g, or c
ccaaggggctgnaagaagatgcagagcagcctgaagctggtggactgtatcatcgaggtccacgatgcccggatcccactttcaggccgcaaccctctgtttcaggaaacccttgggcttaagcctcacttgctggtcctcaacaagatggacttggcggatcttacagagcagcagaaaattatgcaacacttagaaggagaaggcctaaaaaatgtcatttttaccaactgtgtaaaggatgaaaatgtcaagcagatcatcccgatggtcactgaactgattgggagaagccaccgctaccaccgaaaagagaacctggagtactgtatcatggtcattggggtccccaacgtgggcaagtcctccctcatcaactccctccggaggcagcacctcaggaaagggaaagccaccagggtgggtggcgagcctgggatcaccagagctgtgatgtccaaaattcaggtctctgagcggcccctgatgttcctgttggacactcctggcgtgctggctcctcggattgaaagtgtggagacaggcctgaagctggccctgtgtggaacggtgctggaccacctggtcggggaggagaccatggctgactacctgctgtacacccttaacaaacaccagcgctttgggtacgtgcagcactacggcctgggcagtgcctgtgacaacgtanarcgcgkgstkaaaaagtgtggctgtgaarctggggaagacscanaangtgaaggtgctcacgggcacnggtaacgtgaacggtattcag

SEQ ID NO: 136 - DNA, 639 bp, Homo sapiens
  misc_feature (486): n equals a,t,g, or c
  misc_feature (568): n equals a,t,g, or c
  misc_feature (582): n equals a,t,g, or c
  misc_feature (637): n equals a,t,g, or c
ggaaagaatgctccacgtggtggatggtaaagtcccagatacactcaggaagtgtttctcagagggtgaaaaggtaaactatgaaaagtttagaaattggctttttctaaacaaagatgcttttactttctctcgatggcttctatctggaggtgtgtatgttaccctcactgatgatagtgatactcctactttctaccaaactctggctggagtcacacatttggaggaatcagacatcattgatcttgagaaacgctattggttattgaaggctcaatcccggactggacgatttgatttagagacatttggcccattggtttcaccacctattcgtccatctctaagtgaaggtttgtttaatgcttttgatgaaaatcgtgacaatcacatagattttaaggagatatcctgtgggttatcagcctgttgcaggggacccctggctgaaagacaaaaattttgcttcaaggtatttgatgntgaccgtgatggaagttctcttcaggggttgaactgagagacatggtggttgcacttttagaagtctggaaaggacaaccgnactggatgataatnctggattacatatggaactctctgaaatggagaaagcatactggatgcccatggnct

SEQ ID NO: 137 - DNA, 672 bp, Homo sapiens
  misc_feature (635): n equals a,t,g, or c
  misc_feature (661): n equals a,t,g, or c
  misc_feature (663): n equals a,t,g, or c
  misc_feature (667): n equals a,t,g, or c
gttccgccagcagcccgacgctggcaccgccatcaagtttatttaacatatttaataacattagaccgcgggttaagccgcgcacggttttgtattccgtctgctcattgttctgcatattaattgacatttctatagttaaaacaacgtggtgcacctggtgcacattcgggcatgttttgattgtagccgaaaacacccttcctatactgagcgcacaataaaaaatcatttacatgtttttaacaaaataagttgcgctgtactgtgcgcgcaacgacattttgtccgagtcgtgaggtactgaaatggcaatacaacaccctgacatccagcctgctgttaaccatagcgttcaggtggcgatcgctggtgccggcccggttgggctgatgatggcgaactatctcggccagatgggcattgacgtgctggtggtggagaaactcgataagttgatcgactacccgcgtgcgattggtattgatgacsaggcgctgcgcaccatgcartcggtcggcctggtcgatgatgttctgccgacactacgccstggcacgcgatgcgttttctcacccgaaaggccgctgttttgctgatattcagccmatgaccgatgaattkggctkggccgngccctaaccgcctttatttaacccgnangtcnatgcc

SEQ ID NO: 138 - DNA, 514 bp, Homo sapiens
tttttttttttttttttgcctctatgaagagtgtaaggtgtatttcaaagcatagttccagtatcaaaaattgtcttgcattttctcatcagcaggtcagtttgagaaagcacgaacaaagttatagtagttaattttgccttctccatgagagcacatcctgattaactccttaaccaaggagtcatccactgggacgttaagcgattcacagattttaaagaacatgtctctgtccacatatcctgaagcttccttgtcataaatttgaaatgcctcacgaatgttgtctttgcatgagtgatctttcagttgcttctgaattgtgtctattaatgcttccaattcctgcacgcctggatccttttcagtttgcttgctttctgcttctggagcaggcgcttctcgctttcggacatggttctgaattgacgcgagtgcttctggtgaatactgggcagcgttgctctccatgtatttcaaaacatactcgtctgtatcaaggatgatgaac

SEQ ID NO: 139 - DNA, 939 bp, Homo sapiens
  misc_feature (873): n equals a,t,g, or c
  misc_feature (902): n equals a,t,g, or c
  misc_feature (920): n equals a,t,g, or c
  misc_feature (936): n equals a,t,g, or c
ggattcttgagtcactactttggattcttcaaaggtccttcgattctatgcaatctgggatgatacagacagcatgtatggtgaatgtcggacctacatcattcattactatcttatggatgatacggtggaaattcgagaggtccacgaacggaatgatgggagagatcctttcccactcctaatgaaccgccagcgtgtgcccaaagttttggtggaaaatgcaaagaacttccctcagtgtgtgctagaaatctctgaccaagaagtgttggaatggtatactgctaaagacttcattgttgggaagtcactcactatccttgggagaactttcttcatttatgattgtgatccatttactcgacggtattacaaagagaagtttggaatcactgatttaccacgtattgatgtgagcaagcgggaaccacctccagtaaaacaggagttgcctccttataacggttttggactagtggaagattctgctcagaattgttttgctctcattccaaaagctccaaaaaaagacgttattaaaatgctggtgaatgataacaaggtgcttcgttatttggctgkactggaatcccccatcccagaagacaaagaccgcagatttgtcttctcttactttctagctaccgacacgatcagtatctttgagcctcctgttcgcaattctgggtatcattgggggcaagtaccttgggcaggactaaagttgttaaaccatactctacagtgggacaaccctgttctactatgggccccagtgacttctttcattgggtgcctgttgattgaagtgttttgggtcacccggttcatcaaccctggattacagacgagtatggttttggaaatacngggagagccacgttgccccagtatttcanccggaaggcattcgggtncaatttcaggaacccntgt

SEQ ID NO: 140 - DNA, 599 bp, Homo sapiens
  misc_feature (578): n equals a,t,g, or c
ttttttttttttttttttttttttttttttttttttgcctctatgaagagtgtaaggtgtatttcaaagcatagttccagtatcaaaaattgtcttgcattttctcatcagcaggtcagtttgagaaagcacgaacaaagttatagtagttaattttgccttctccatgagagcacatcctgattaactccttaaccaaggagtcatccactgggacgttaagcgattcacagattttaaagaacatgtctctgtccacatatcctgaagcttccttgtcataaatttgaaatgcctcacgaatgttgtctttgcatgagtgatctttcagttgcttctgaattgtgtctattaatgcttccaattcctgcacgcctggatccttttcagtttgcttgctatggggagtggagggtaagaagtgggtacatgaaagatggggtaggaacaaagcttttccttggtcccttcatatctgtgtcttcaaatatttcatttcacaagggttcatgatagactttctgcttctggagcaggcgcttctcgctttcggacatggttctgaattgacgcgagtncttctggtgaatactgggcag

SEQ ID NO: 141 - DNA, 884 bp, Homo sapiens
ggcagactgtctgggacagacgctgcccggatccctgcggctgcctgcactctggaccacgagctctgagagcagcaggttgagggccggtgggcagcagctcggaggctccgcgaggtgcaggagacgcaggcatggccggtgagctgactcctgaggaggaggcccagtacaaaaaggctttctccgcggttgacacggatggaaacggcaccatcaatgcccaggagctgggcgcggcgctgaaggccacgggcaagaacctctcggaggcccagctaaggaaactcatctccgaggttgacrgcgacggcgacggcgaaatcagcttccaggagttcctgacggcggcgaagaaggccagggccggcctggaggacctgcaggtcgccttccgcgccttcgaccaggatggcgacggccacatcaccgtggacgagctcaggcgggccatggcggggctggggcagccgctgccgcaggaggagctggacgccatgatccgcgaggccgacgtggaccaggacgggcgggtgaactacgaggagttcgcgaggatgctcgcccaggagtgaggctccccgcctgtgtccccctgsstgcgctctgagccttcagggccaccgcccgctgctgcttttgtgctgggactctccggggaaacctggtcggtggatgggaaactgcctccccctgggaggaaggctttgcgctccggggcctggatgcggcgccctcgggccgcctgcgagcccctctctgcctccagaccttgggcagaaggaggcctccttgggcctggtccccctttgccctgcagtggaatgagggcccctcagccccgcattgatctaaataaaggactgccgagttcaaaaaaaaaa

SEQ ID NO: 142 - DNA, 1084 bp, Homo sapiens; identical to SEQ ID NO: 64
  misc_feature (989): n equals a,t,g, or c
  misc_feature (1014): n equals a,t,g, or c
  misc_feature (1032): n equals a,t,g, or c
  misc_feature (1059): n equals a,t,g, or c
  misc_feature (1066): n equals a,t,g, or c

SEQ ID NO: 143 - DNA, 755 bp, Homo sapiens
  misc_feature (693): n equals a,t,g, or c
  misc_feature (702): n equals a,t,g, or c
  misc_feature (728): n equals a,t,g, or c
  misc_feature (743): n equals a,t,g, or c
  misc_feature (747): n equals a,t,g, or c
gcagatctggtaccaaaggagaatttggagagctggctaaattatttgaagaaagaattgccaacagtggtgttcagagcctcaacaaaaccaaaggataaagggaagataaccaaggtatcctttattagtggtaagaaatgtgattctttcagattttggttgaaatatgatgagtgtacaaaatcttgatttaagtgaatgaaaaattacaagatccaactctgatttcagccagagatcatctgaaaggcaatgtagttatcttaagagctgggctctggagcctgattgcttggggtttgttgaaatttatcaggtaagttgccagaataattcaactatttggaattttagcgtgtgaaggcaaagaagaatgctgctccattcagaagtgaagtctgctttgggaaagagggcctttggaaacttcttggaggttttcaggaaacttgcagcaaagccattcgggttggagtaattggtttcccaaatgtggggaaaagcagcattatcaatagcttaaaacaagaacagatgtgkaatgttggkgtatccatggggcttacamggagcatgcaagttgyccccttggrcaaacagatcacaatcatagatagtcccgascttcatcgtatctttcacttaattcctcctctgcgctttgctctgcgaagtccagcaaagtattgnaagtaattnaaacccgatcggaaggctgcccaatncccatcccttttccncaangcctggat

SEQ ID NO: 144 - DNA, 1457 bp, Homo sapiens
gcagcgccggaacctcagaggcgggtcgcagcggcgcagaggaggtcagctgcgggagcgtttccggggacggtgccgccatgagattgaccccgcgcgcgctgtgcagcgccgcccaggccgcctggcgggagaacttccccctgtgcggtcgcgacgtggcgcgctggttcccgggccacatggccaaggggctgaagaagatgcagagcagcctgaagctggtggactgtatcatcgaggtccacgatgcccggatcccactttcaggccgcaaccctctgtttcaggaaacccttgggcttaagcctcacttgctggtcctcaacaagatggacttggcggatcttacagagcagcagaaaattatgcaacacttagaaggagaaggcctaaaaaatgtcatttttaccaactgtgtaaaggatgaaaatgtcaagcagatcatcccgatggtcactgaactgattgggagaagccaccgctaccaccgaaaagagaacctggagtactgtatcatggtcattggggtccccaacgtgggcaagtcctccctcatcaactccctccggaggcagcacctcaggaaagggaaagccaccagggtgggtggcgagcctgggatcaccagagctgtgatgtccaaaattcaggtggagtcctcaggggccaggcccagcactctgtcaagagctctgcaggcgtctggcacctgccgacctctgtgtggcttccggctgctgaccacgcttccctcccctccactcagtgtccccgctgagcacccccggggcaggcactgcccctgcccttattccacagtcgtcatagtctttgcgccaaacctttggggaaggcacgctgttttccccatttccagatgaggaggccactgtccagggccatgcagtggtcaggacagacctgagtgtggcgccccccgccccaccctccactcccttccttgtgttctccttgggagcagaagacaagctgttgggacctgacgcttttatttattctccaaattaagtgggaattagatcctctggggaaccctggagcttggtgagagtgacgctgccatggggttgggtccctgaggccttcctcggagcattgggtgccaggggctgcccaggcttcctgagtggcccacctgggtgggaggctgccaccgcggcctgatcatgccctctgtgcccacacaggtctctgagcggcccctgatgttcctgttggacactcctggcgtgctggctcctcggattgaaagtgtggagacaggcctgaagctggccctgtgtggaacggtgctggaccacctggtcggggaggagaccatggctgactacctgctgtacaccctcaacaaacaccagcgctttgggtgagtgcagtgaatgcagggcagctggggcccctcctcctagtcacctcatttaaaaaaaaaaaac

SEQ ID NO: 145 - DNA, 1884 bp, Homo sapiens
  misc_feature (1855): n equals a,t,g, or c
gaaatcagcctcttgccccattgctctttgcaggggtagaagaaggaagtgtagcggggtaaggaatgcaccgtcaggtctctcacaaccctttcccagctctcctccccaacaaacagtacctgggatggagccctagggtaatcgcagccacgggatgggtcgaggtgacaggcttcagggaccacacttcggcctttgcccgaccttccacaacttaagcgaagagaggccaccagccgtaacagggcgttaaagcccaggggaagattggtccttatgacttcctgccttccagccctcagattcatcgctaccccgaggctaagcgccatgcctcatattgacaacgatgtgaaactggacttcaaggatgtccttttgaggcccaaacgcagtacccttaagtctcgaagtgaggtggatctcacaagatccttttcatttcggaactcaaagcagacatactctggggttcccatcattgctgccaatatggatactgtgggcacctttgagatggccaaggttctctgtaagttctctctcttcactgctgtccataagcactatagcctcgttcagtggcaagagtttgctggccagaatcctgactgtcttgagcatctggctgccagctcaggcacaggctcttctgactttgagcagctggaacagatcctggaagctattccccaggtgaagtatatatgcctggatgtggcaaatggctactctgaacactttgttgaatttgtaaaagatgtacggaagcgcttcccccagcacaccatcatggcagggaatgtggtaacaggagagatggtagaagagctcatcctttctggggctgacatcatcaaagtgggaattgggccaggctctgtgtgtactactcggaagaaaactggagtggggtatccacagctcagcgcagtgatggagtgtgcagatgctgctcatggcctcaaaggcacatcatttcagatggaggttgcagctgtcctggggatgtggccaaggcttttggggcaggagctgacttcgtgatgctgggtggcatgctggctgggcacagtgagtcaggtggtgagctcatcgagagggatggcaagaagtacaagctcttctatggaatgagttctgaaatggccatgaagaagtatgctgggggcgtggctgagtacagagcctcagagggaaagacagtggaagttccttttaaaggagatgtggaacataccatccgagacatcctaggagggatccgctctacgtgtacctatgtgggagcagctaagctcaaagagttgagcaggagaactaccttcatccgagtcacccagcaggtgaatccaatcttcagtgaggcgtgctagacctgagcagttctaccctcccaaggcaccagtactctaccatggggcatcccaagtggggtcctcacccatcccagctactgcagctctgtattactttgtcatttcctgttgtctcactcctgagggctcctgcagtaactctgtacttctctatctgcacacacaaaatkcccaaggcactcactggggaggaagcaaggaagcaaacagtctgagaaaatgatgcaagaaaatcaaatgggaatctggggacccaacacaacatcctgaagattattaaaaggaaaagatgctgattggtacataaatcttttacatggccttggtctagaggaggcaggcttttagaatcatgttttgttaatccgcttcactaaattggaccttcacatatctaaaaagctctgaagtgtttgtatatttgaaatacctcaataaagagagagctcattgactgtaaaaaaaaaaaaaanagggcggccgctttaaaggtccaagttta

SEQ ID NO: 146 - DNA, 333 bp, Homo sapiens
cccgcagcagctcccaggatgaactggttgcagtggctgctgctgctgcgggggcgctgagaggacacgagctctatgcctttccggctgctcatcccgctcggcctcctgtgcgcgctgctgcctcagcaccatggtgcgccaggtcccgacggctccgcgccagatcccgcccactacagggagcgagtcaaggccatgtttaccacgcctacgacagctacctggagaatgcctttcccttcgatgagctggamcttctcacctgtgacgggcacgacamctggggcagtttttctctgactctaattgatgcactggacaacttgctga

SEQ ID NO: 147 - DNA, 1309 bp, Homo sapiens
  misc_feature (1173): n equals a,t,g, or c
ggagcagcctccctgccacctgccagtccctactcagtgccgcccatccctgtgctgctgtgcctgctcagagccatctggctccctgggatttgagtctgctgtttctcctctctctctctgcaggggtgctgatggtctgtatagtgattggtgctcgaaagctcggggtcaacccagacaacattgccacgcccattgcagccagcctgggagacctcatcacactgtccattctggctttggttagcagcttcttctacagacacaaagatagtcggtatctgacgccgctggtctgcctcagctttgcggctctgaccccagtgtgggtcctcattgccaagcagagcccacccatcgtgaagatcctgaagtttggctggttcccaatcatcctggccatggtcatcagcagtttcggaggactcatcttgagcaaaaccgtttctaaacagcagtacaaaggcatggcgatatttacccccgtgcatatgtggtgttggtggcaatctggtggccattcagaccagccgaatctcaacctacctgcacatgtggagtgcacctggcgtcctgcccctccagatgaagaaattctggcccaacccgtgttctactttctgcacgtcagaaatcaattccatgtcagctcgagtcctgctcttgctggtggtcccaggccatctgattttcttctacatcatctacctggtggagggtcmgtcagtcataaacagccakacctttgtggtgctctacctgctggcaggcctgatccaggtgacaatcctgctgtacctsgcaraagtgatggttcggytgacttggcaccaggccctggatcctkacaamcaytgcatcccctaccttacagggstgggggacctgytcggttcaagctccgtgggccacactgctgctgtgccaagaaggtgtacagmctccccaggatgggcctcatacaacccttcatctgcactcaacatttaatcgtgtccttgctgtctttttattttcctttttgtttgttagcaaaaacctctatttagatttcaataatcagagaagtgtaaaataaaacagattatattgtacttgaccctttatgtctttaaagatagttaatgcaaccctgaggcttggggtctataaataacaaaagcatctggntttctctagtgcagtgtttctcaaagtggcttcagctagaaacgtcagtgtcaccaaggaaacttgttagaagtgcaattattatccctcaacccctgggctgactaagcaaatcagcattcttgggagtagagca

SEQ ID NO: 148 - DNA, 155 bp, Homo sapiens
  misc_feature (1): n equals a,t,g, or c
nattttttgggctttgatttattgcgaaggaactcttgaagggtttgatttcctttttgccgatgtctccactggagtttttatccagtagtttgaagtaccagtgcaccacccgctcctctagggtatggctgctcgtgccgaattcctgcagc

SEQ ID NO: 149 - DNA, 698 bp, Homo sapiens; identical to SEQ ID NO: 75
  misc_feature (509): n equals a,t,g, or c
  misc_feature (600): n equals a,t,g, or c
  misc_feature (641): n equals a,t,g, or c
  misc_feature (667): n equals a,t,g, or c
  misc_feature (698): n equals a,t,g, or c

SEQ ID NO: 150 - DNA, 445 bp, Homo sapiens
  misc_feature (425): n equals a,t,g, or c
  misc_feature (432): n equals a,t,g, or c
  misc_feature (440): n equals a,t,g, or c
taaccagtgccctgttgatgggcagttcatctgttttgaatgttttctattgtttccaagggatggcagcaaaattcagaaggcttagactaccactgtcctccacaaggtgctccagcagattgtcaccttattcaacacaagaggttggttggaatgaaactggcctggagaaattattcactgaatttttatcagcattgggaagtcctggagccctgcttgttgaatgagttaggggtggaagggctctctcaggccatgacaactccctaatgctgtgaagagctacttccaaggaatcagtctctatctggaaaagaaagaagagagcctctgtacatgggaagttggagcaagaaatcatgagatccttctttttttcatcaaacttgcaagtaaggtttattagcttaggaccagantgtgtcntcaggaanggtta

SEQ ID NO: 151 - DNA, 992 bp, Homo sapiens
gctggaagagtaccaggccctgaccttcctgaccagaaatgaaattctgtgcatccatgacaccttcctgaagctctgccctcctgggaagtactacaaggaggcaacgctcaccatggaccaggtcagctccctgccagctctgcgggtcaaccctttcagagaccgtatctgcagagtgttctcccacaaaggcatgttctcctttgaggatgtgctgggcatggcatctgtgttcagcgagcaggcctgcccaagcctgaagattgagtatgcctttcgcatctatgattttaatgagaatggcttcattgatgaggaggatctgcagaggatcatcctgcgactgctgaacagtgatgacatgtctgaggacctcctgatggacctcacgaaccacgtcctgagtkagtcggatctggacaatgacaacatgctgtccttctcagagtttgaacatgcaatggccaagtctccagatttcatgactcctttcggattcrcttctggggatctgatgtagcggcaaatacctgacatggcagcctcgagggagaccacaggaatcgaaccccctccagcactggagggagctggtttgaagtgtgactttgtactgggcccacmctcacctctagaatattgtttattagataaaagaaaaagcttttccttagcccatcagatcatcgctttttaaatgcagggtcatacatggtactttttattaagaactgccctttccagggcttcagtgtgccagcgatgtcaagcaggctggggtggcaatctttctgagggaatagttcaaatctcaacccatgtcatagcagggggccaagccaaatgggatgaaggtccctagcaagatacatgtccttccctcccttcatcaaaacccccgacccccagcacctcacagttcacagctgcacagagacgtgcacatagcagccattccagccggtgcccggtccccactccccttctga

SEQ ID NO: 152 - DNA, 339 bp, Homo sapiens
aggaagagacgaccctggagccagtccccagagcagcagccagccagaccacggccgcctctcccccccagaagctcccgacaggcccaccatctccacggcctccgagacctcagtgtacgtgacctggattccccgtgggaatggtgggttcccaatccagtccttccgtgtggagtacaagaagctaaagaaagtgggagactggattctggccaccagcgccatccccccrtcgcggctgtccgtggagatcacgggccttagagaaaggcacctmctacaagtttcgagttccgggttytgaacatgctgggggagagcgagcccagsgcccct

SEQ ID NO: 153 - DNA, 1077 bp, Homo sapiens
ggcagagccctgctcccctctccgaccctttgagccgtggccgttgccagatgtccacaatgggaaacgaggccagttacccggcggagatgtgctcccactttgacaatgatgaaattaaaaggctgggcaggaggtttaagaagttggacttggacaaatcagggtctctgagcgtggaggagttcatgtccctgccggagctgcgccacaacccgttggtgcggcgagtgatcgacgtcttcgacaccgacggtgatggagaagtggacttcaaggaattcatcctggggacctcccagttcagcgtcaagggcgacgaggagcagaagttgaggtttgcgttcagcatttacgacatggataaagatggctacatttccaacggggagctcttccaggtgctgaagatgatggtgggcaacaacctgacggactggcagctccagcagctggtcgacaaaaccatcatcatcctggacaaggatggcgatgggaagatatcctttgaggaattcagtgctgtggtcagagacctggagatccacaagaagctggtcctcatcgtatgagcctttttcttacaagcaccacccaacaacttctgctttcttccctatctctttcaagatttgctcaagacgtccaactgtctctctgacttatctggaagtatttctttttgtgaagccatatgtcctaacaggagcttcatcaccaactcagtgctattaattctccttctctgaatgactcagggtaccctatagggggaagagcaagtcaaatgagcatagtggggaaagaaaaggaaatggcttttataaacatcttttactttgttttgattcaaagaccaaactagaactttaaaagttcaaaaataagaaagtatacatttttgctgttatttctcatcattttgtatatgggaggaaatttataatttgcatgggtgttaggtgaactgttttcatttgcttgtgttcagatatcttgccagattgttaacttcctattgtagcaacagggacaaatatatttgtytttgcyggrmaaaaaaaaaaaaaaaaaaaa

SEQ ID NO: 154 - DNA, 1556 bp, Homo sapiens
  misc_feature (146): n equals a,t,g, or c
  misc_feature (151): n equals a,t,g, or c
  misc_feature (247): n equals a,t,g, or c
  misc_feature (686): n equals a,t,g, or c
  misc_feature (1378): n equals a,t,g, or c
gaaagaggagtcatggcacatccacttcttcgagtacgggcgtggcgtgtgcatgtaccgcacagccaagacgcgggcactggtcctgaagggtatccctgagagcctccggggagagctgtggctcctcttctccggggcctganatganatggtgactcaccccgggtactatgctgagctggtggagaagtccacgggaaagtacagcctggccacagaggagatcgagcgagacctgcaccgntccatgcccgagcaccctgcctcccagaacgagctggggattgctgccctccggcgggtgctgactgcctatgccttccgaaaccccaccatcggctactgccaggcaatgaacatcgtgascctmggtgctcctgctctatggcagtgaggaggaggccttctggctcctggtggccctgtgcgagcgcatgctgcccgactactacaacaccagggtggtggggagccctggtggaccaaggcatcttcgaagagctcacgagagacttcctgccgcagctctcggagaagatgcaggacctgggggtgatctccagcatctcgctgtcctggttcctgaccctcttcctcagcgtcatgcccttcgagagcgccgtggtcatcgtcgactgctttttctatgagggcatcaaggtgatcctgcaggtggccctggncgtcctggacgccaacatggagcagctgctgggctgcagcgacgarggcgaggccatgaccatgctgggcagatacctggataatgtggtcaacaagcagatgtctctcctcctatcccgcacctccgtgccttgctgagcagcagcgatgacccccctgcagaggtggacatctttgagctcctgaaagtgtcctatgagaaattcagcagcctgagggccgaagacattgagcagatgcggtttaaacagaggctgaaagtgatccagtccttggaggacacggccaagaggagtgtggtccgagctatacctgtggacattggtttctccattgaagagctggaggacctttacatggtgtttaaggccaagcacctggctagccagtactgggggtgcagccgcacaatggccggccgtcgggaccccagcctgccctacctggagcagtaccggattgatgccagccagttccgggaactctttgccagcctgacaccctgggcctgtggctcccacacacctctgctggcagggcgcatgttcaggctcctggacgaaaacaaggactcgctgatcaacttcaaggagttcgtgacagggatgagcgggatgtaccacggggacctgacagagaagctcaaggtgctctacaagctacaccttcccccagctctgagcccagaggnaagccgagtcagccctggaggcgrcccattatttcacagaggacagctycttcagaagaagcacttaccacaggaagagcaagaaggaagtggaagtgaggagagaggagaggagaaggggaccagctctccggactatcggcattaccttcgattgtgggcccaaggagaaagaggt

SEQ ID NO: 155 - DNA, 483 bp, Homo sapiens
tggtgggttaaccatacggaggtgactattccttacctggccacagatgtgacttgtgtggggccaggagcacacaagggccaaagtgtgatctccctggatctgtacacctgtgagttagatctgactaacctgattctgttctcactttccatatctgtatctctctttctcatggtgatgatgacagcaagtcacctctatttctgggatgtgtggtatatttaccatttctgtaaggccaagataaaggggtatcagcgtctaatatcaccagactgttgctatgatgcttttattgtgtatgacactaaagacccagctgtgaccgagtgggttttggctgagctggtggccaaactggaagacccaagagagaaacattttaatttatgtctcgaggaaagggactggttaccagggcagccagttctggaaaacctttcccagagcatacagcttagcaaaaagacagtgtttgtg

SEQ ID NO: 156 - DNA, 829 bp, Homo sapiens
  misc_feature (799): n equals a,t,g, or c
gtggctgctccggcccttccgcctccagctcggccatggggtcgcgcactcccacgccgcggtcattcccgacggggacagtattcggcgagagaccggcttctcccaagccagcctgctccgcctgcaccaccggttccgggcactggacaggaataagaagggctacctgagccgcatggatctccagcagataggggcgctcgccgtgaaccccctgggagaccgaattatagaaagcttcttccccgatgggagccagcgagtggatttcccaggctttgtcagggtcttggctcattttcgccctgtagaagatgaggacacagaaacccaagaccccaagaaacctgaacctctcaacagcagaaggaacaaacttcactatgcatttcagctctatgacctggatcgcgatgggaagatctccaggcatgagatgctgcaggttctccgtctgatggttggggtacaggtgacagaagagcagctggagaacatcgctgaccgcacggtgcaggaggctgatgaagatggggatggggctgtgtccttcgtggagttcaccaagtccttagagawgatggacgttgagcaaaaaatgagcatccggatcctgaagtgactccgtttgtgccttgggcttgctcctgcaaccagtatctccttggaattcatccaaagcccccatggacgcatggacgcaggcgacaataaactgtattttcgtttctaactctatttagggccaagagaagaaagctggaggatgtgtacttaaagtttagcttcagcagtncccaaaccttttttgggaatcaagggacaa

SEQ ID NO: 157 - DNA, 567 bp, Homo sapiens
  misc_feature (236): n equals a,t,g, or c
  misc_feature (238): n equals a,t,g, or c
  misc_feature (542): n equals a,t,g, or c
  misc_feature (556): n equals a,t,g, or c
actcctgagctcaggcaatctgtccacctcgacctcccaaactgctaggattacaagcktgagacccagcctcatacttatttttaatatttaaaatgattttgcttttcttgtttcttagtgcatgtaaagaagtatctttgcctgctgtataactgtgtgtatctcattttcctcacagtacttattgattccatttacaaagtgactgagggccggcagtctgaaatattccncnttacaagctgaggggaacttcgaccccagctgctgcttcaccatctaccatggcaaccacatggagtccctggacctcatcacctccaaccccgaggaggcccgcacctggatcacaggcctcaagtacctgatggctggcatcagtgatgaagactcccttgccaaaaggcagaggacccatgaccaatgggtgaagcagacctttgaggaagctgataagaatggtgacggcttgctgaatattgaagagatacatcagctgatgcataaactgaatgttaatctgccccgaagaaaagtcngacaaatgtttcangaagccgacac

SEQ ID NO: 158 - DNA, 641 bp, Homo sapiens
  misc_feature (578): n equals a,t,g, or c
  misc_feature (624): n equals a,t,g, or c
  misc_feature (626): n equals a,t,g, or c
  misc_feature (633): n equals a,t,g, or c
  misc_feature (640): n equals a,t,g, or c
ggtggagtaagccagaaggctgttcacccgaggaagtgatcacctacaccttggaaattcaggaggatgaaaatgataaccttttccacccaaaatacactggagaggatttaacctgtactgtgaaaaatctcaaaagaagcacacagtataaattcaggctgactgcttctaatacggaaggaaaaagctgtccaagcgaagttcttgtttgtacgacgagtcctgacaggcctggacctcctaccagaccgcttgtcaaaggcccagttacatctcatggctttagtgtcaaatgggatccccctaaggacaatggtggttcagaaatcctcaagtacttgctagagattactgatggaaattctgaagcgaatcagtgggaagtggcctacagtgggtcggctaccgaatacaccttcacccacttgaaaccaggcactttgtacaaactccgagcatgctgcatcagtaccggcggacacagccagtgttctgaaagtctccctgttygcacactaagcattgcaccaggtcmatgtcgaccaccgagggtttgggtagaccaaagcacaaanaagtccacttagagtgggaatgttcctgcatcggaaagtggctgtnangtctcanagtacanc

SEQ ID NO: 159 - DNA, 1269 bp, Homo sapiens
  misc_feature (719): n equals a,t,g, or c
gcggacgcgtgggcggcggcgtccagggtcggcagcaaccgcagccgagcccgagcgggtggcggcgccatggcgtgcgcggggctgctcaccgtgtgcctgctccggccgcccgcgccccagccccagccccagaccccgcggcacccccagctcgcgcccgacccggggcccgccggacacacgctcttccaggacgttttccgcagagcagacaagaatgatgatgggaagctctcatttgaggaattccagaattactttgccgatggggttctcagcctgggggagctgcaggaactgttcagcggcattgatgggcatctcaccgacaatttagaaacagaaaaactgtgtgactacttctcagagcacctgggtgtctaccggccggtgctggctgcattggaatcgctgaaccgtgcagtgctcgctgccatggatgccaccaagctggagtacgagagggcctccaaagtggaccagtttgtgacrcgcttcctgctgcgggagacggtgagccagctgcaagcccttcagagctcgctggagggggcgtcagataccctggaggcccaggcccatggctggcggtcagatgcagagagcgtggaggcgcagagcaggctctgcggcagccggcgggcaggacgccgagccctgaggagtgtcagccggtcatccacctggtcccccggctcttctgacacagggcgcantcagaggccgagatgcagtggcggctccaggtgaaccgcctccaggagctcatcgaccagctcgagtgcaaggccccccggctggaacccctgcgtgaagaggacctggccaaggggcctgacttgcacatcctcatggcccagaggcaggtccaggtggcagaggaaggcctgcaggacttccaccgagccctgcgctgctatgtggacttcacaggggcccagagccattgtctgcatgtgtccgcccagaagatgctggacggtgcctccttcaccctgtatgagttctggcaggatgaggcctcctggagaaggcaccagcagtcgcctggcagcaaggccttccagcgcatcctcatcgaccactgcgggccccggacaccctcaccactgtgttcttcccagcctcctggtggataatgaataacaactgagccagacctgcacacgccgagggccccgggaccctgcctgcctctgaaccccaggtgggaccccagcacagaggcaataaaggcagtggtcccttccaaaaaaaaaaaaaaaa

SEQ ID NO: 160 - DNA, 2678 bp, Homo sapiens
  misc_feature (2535): n equals a,t,g, or c
  misc_feature (2628): n equals a,t,g, or c
  misc_feature (2638): n equals a,t,g, or c
  misc_feature (2669): n equals a,t,g, or c
cggtctctcagagccgcacactccgcggagctcctgccacagccgtcgccttcgcggcggctctccagccccgcgcctcagcctcggcgccgcatcaccgcgtcccaggcctccttccctccctctgccactccccctccctttcccgctcttcttgcccacccggccggcagagagagcctggatacgaagcaggcgggcttcagagtgggttggaaaaatggaggtgccgcgcctggatcatgccctcaacagccccaccagcccctgtgaggaggtgatcaaaaacctcagcctggaggccattcagctgtgcgaccgggacgggaacaaatcacaagacagtggcatagcagagatggaagaacttcctgtaccacataacatcaaaataagcaatataacgtgtgactcattcaagatttcatgggaaatggattcaaaatcaaaggatcgcattacacactattttattgacctcaacaagaaagagaacaagaactccaataaatttaaacacaaggatgttcccacaaaattggtggcaaaagctgttcccttgcctatgactgtccgtggacactggtttttaagcccaagaactgaatatacagtagcagtgcagactgcctcaaaacaagttgatggtgattatgttgtgtctgaatggagtgaaattatagaattctgcaccgcagactattcaaaagttcatctaacacaattgttggagaaggctgaagtgattgcaggacgcatgcttaagttttctgttttttatcgtaatcagcacaaagaatattttgactatgttcgagaacatcatgggaatgctatgcagccatctgtcaaggataacagtggtagccatggctctcctatcagtggaaaattagaaggcatcttcttcagctgcagcactgaattcaatactggaaagccaccccaggattcaccttatggaagatacaggtttgagattgccgcagaaaaactttttaaccccaatactaacttatactttggggacttctactgtatgtacactgcttatcattatgtgattcttgttattgctcctgtgggatcaccaggagatgaattttgtaagcagcgccttcctcaactaaattctaaggataataaatttttgacctgtacagaagaagatggggtgctggtttaccaccatgcccaggatgtcattttagaagtcatttacactgaccctgtggatctttctctgggcaccgtggcagaaatcactggtcatcagctcatgagtttgtctactgcaaatgcaaagaaagatcccagctgcaaaacctgtaatatcagtgttggacgttaatgcccacttttcttattcttactcagccccttttcctcccttaggagcattggtcctctgttgtccatttttatcaccagatgttttccactgaagcatgcacatgccactgtcaccaaaacaaacaactaccactttccaaatttcattcagaaccattttagtgttttcctattccctacccctcccactactttcaatgatgaaataccctaagttaagttctccttttgacactttattgcctagatgctgcaatgtttttatgtttcctttatgccaaacataacaaaacagttatatagactgctttagcaaagtacacaataatggcttataaatggtgtttaaatatgcattcattttaatctactgaacaaatattgggataactccaaaccgcatgaaagggtgtaattgcagcatgagttaaatcttgaagcctagaattgtcagcacttccaacttcttgtttgacagtgttatttatgttatttatattagctaacaggaaacaactactgtgtttcaacataataaatataatagaaaaatattttatttgtattgttgtataaaatatttacaatcatatagaatatatagagttacattttaatagcaactgtgtacatgtcacgaaaccatttcccttatcaaagatgtaatttgtaaacctcaaatagttgtgtatctgtcctgttagaagtagatgacttcaattaaacaaatttatgaaggacattattctgattcataaaagttataaaatattaggtaaatacagagaaaacaataagcctctgaaataagtctgtttctgaaatagtcaatagtcttcccatccaaactataagagaatgtgaatttcttcaacatcatacttaaacattacagaaaatagaaatacaaacaaggttggtacatgagagaaaatgttgaccttttacttccttttacaaaaatgaaaataataaacatgttttcgtataaaataacacaaaatgatatacactgaagttgatgaagcaaataaatattctggcttctttttcaaggtatcagggcaaacaatttccaaacttttcattttgtacagaaggatgaataactacagctcatggggaaatgttttgactttacaaagtatagatgttgggaacattaaggaaaaatgtatattncccaatggaaaaaatagttattatccatcttataggtaaaccaaaaggattaggccattaatactttggggccactttgggtttttatacctnccgggccccntttcctttccccaattaccccttttttaaanttttttatt

SEQ ID NO: 161 - DNA, 1380 bp, Homo sapiens
  misc_feature (1325): n equals a,t,g, or c
  misc_feature (1369): n equals a,t,g, or c
gatttagtctggaagctcttcaaacaatacataaacaaatggatgatgacaaagatggtggaattgaagtagaggaaagtgatgaattcatcagagaagatatgaaatataaagatgctactaataaacacagccatctgcacagagaagataaacatataacgattgaggatttatggaaacgatggaaaacatcagaagttcataattggacccttgaagacactcttcagtggttgatagagtttgttgaactaccccaatatgagaagaattttagagacaacaatgtcaaaggaacgacacttcccaggatagcagtgcacgaaccttcatttatgatctcccagttgaaaatcagtgaccggagtcacagacaaaaacttcagctcaaggcattggatgtggttttgtttggacctctaacacgcccacctcataactggatgaaagattttatcctcacagtttctatagtaattggtgttggaggctgcwggtttgcttatacgcagaataagacatcaaaagaacatgttgcaaaaatgatgaaagatttagagagcttacaaactgcagagcaaagtctaatggacttacaagagaggcttgaaaaggcacaggaagaaaacagaaatgttgctgtagaaaagcaaaatttagagcgcaaaatgatggatgaaatcaattatgcaaaggaggaggcttgtcggctgagagagctaagggagggagctgaatgtgaattgagtagacgtcagtatgcagaacaggaattgsaacaggttcgcatggctctgaaaaaggccgaaaaagaatttgaactgagaagcagttggtctgttccagatgcacttcagaaatggcttcagttaacacatgaagtagaagtgcaatactacaatattaaaagacmaaacgctgaaatgcagctagctattgctaaagatgaggcagaaaaaattaaaaagaagagaagcacagtctttgggactctgcacgttgcacacagctcctccctagatgaggtagaccacaaaattctggaagcaaagaaagctctctctgagttgacaacttgkttacgagaacgactttttcgctggcaacaaattgagaagatctgtggctttcagatagcccataactcaggactccccagcctgacctcttccctttattctgatcacagctgggtggtgatgcccagagtctccattccaccctatccaattgctggaggagttgatgacttagatgaagacacacccccaatagtgtcacaatttcccggkaagtggctaaacctcctggatcattagccngaagcagcagcctgtgccgttcacgccgcagcattgtgccgtcntcgcctcagcc

SEQ ID NO: 162 - DNA, 965 bp, Homo sapiens
  misc_feature (516): n equals a,t,g, or c
  misc_feature (525): n equals a,t,g, or c
  misc_feature (555): n equals a,t,g, or c
gcggtgcggctcctccctgcttttgaaaacaccaagacagggattccatatcctcgggtgaatctaaagacaggagttcctcctgacaccaataatgagacatgcacagcgggagccggttccctcctggtggaatttgggattctgagtcgactcctgggggactccacatttgagtgggtggccagacgagcagtgaaagccctttggaacctccggagcaatgatacaggattactaggcaatgtcgtgaacattcagacgggccactgggttggaaagcagagtggcctgggtgccgggctggactccttctatgaatacctcttgaaatcttacattctctttggagaaaaagaagacctagaaatgtttaatgctgcatatcagagtattcagaactacttaaraaragggcgggaagcctgcaatgaargagaargaraccctycactytatgtcaacgtgaacatgttcagtgggcagctgatgaacacctggattgactctctgcangcctttttncctggactgcargtgctgataggagatgtngaagatgccatctgccttcatgccttctactatgccatatggaaacgatatggtgccctccctgagagatataactggcagctgcaggcccctgacgttctcttctacccactgagaccagagttagtggaatccacatatctcctctaccaggcaaccaagaatcccttytacctccatgtaggaatggatattctgmagagtckggaaaagtacacaaaagtcaagtgtgggtacgccacgctgcatcacgtcattgacaagtccacagaagaccggatggagagcttctttctcagtgagacctgtaaatatttgtatctgctgtttgatgaagacaatccagtacacaagtcttggaaccagatacatgttcacaacagagggacacattgtatctgtggatgagc

SEQ ID NO: 163 - DNA, 1433 bp, Homo sapiens
actcagatacggctaaacccagtttacaaagcagtagtgtcttctgacaaatctgggatgattgaatactggactgggcctcctcatgaatataaattccccaaaaatgtgaactgggaatataaaactgacactgatttatatgaatttgccaagtgtaaggcttatccaaccagcgtatgtttttcaccagatgggaagaaaatagctactattggttctgatagaaaagttagaattttcagatttgtaactggaaaactcatgagagtctttgatgaatcactaagcatgtttactgaactgcaacagatgaggcaacagttaccagacatggaatttggccgacgaatggctgtagaacgtgagttggagaaggttgatgctgtaagattaattaatatagtttttgatgaaactggacacttcgtgctgtatggaacaatgctgggcattaaagttataaatgtagagacaaaccggtgtgtgcggattttaggcaaacaagaaaatattagagtgatgcaattggctttgttccaggggatagccaaaaagcatcgtgctgcaactactatagaaatgaaagcttctgaaaatcctgttcttcagaatattcaagctgacccaacaatagtctgtacatcattcaaaaagaatagattttatatgtttaccaaacgagaaccagaagatacgaaaagtgcagattctgatcgagatgtttttaatgagaaaccttctaaagaagaagtcatggcagctactcaagctgaaggacctaaacgagtttcggacagtgccattatccacaccagcatgggagacattcacaccaaactttttcctgttgagtgccctaagacagtggaaaacttctgtgttcacagcagaaatggttattataatgggcatacatttcaccgtataattaagggctttatgattcagactggagatccaacaggtactggtatgggaggagaaagcatatggggaggagaatttgaagatgaatttcattcaacattacgacatgacaggccgtacacactcagcatggctaacgcgggatcaaatactaatggatcccagtttttcataacggtagtaccaacgccttggcttgataataagcatacagtatttggacgagtgactaaaggaatggaagttgtacagaggatctccaacgtcaaagtcaatcccaaaacagataagccctatgaggatgtcagcatcataaatattactgtcaagtaaaataagatttgttttaatgtacttgcaaataaaaatacaatattaaacagattattttacattaggaagcttaggacttgctgaatatacagatcatgtttcaaagatacagtatttttgtattttttattaaaggctattttttaaaaattaaaaaaaaaaaaaaaaaa

SEQ ID NO: 164 - DNA, 278 bp, Homo sapiens
  misc_feature (11): n equals a,t,g, or c
  misc_feature (12): n equals a,t,g, or c
cagccaggaannrttacgtgttccaggtacaggccatgaattcagctggtctggggcaaccgtccatgcccactgatcccgtgctcctggaggacaagccaggtgcccatgagatcgaggttggtgtggatgaagagggctttatctatttggcttttgaagcccctgaagcccccgactcctcagagtttcagtggtccaaagactacaagggcccactggacccccagagggtcaagatcgaggataaagttaacaagtccaaggtcatcctgaaa

SEQ ID NO: 165 - DNA, 1355 bp, Homo sapiens
  misc_feature (44): n equals a,t,g, or c
  misc_feature (55): n equals a,t,g, or c
  misc_feature (126): n equals a,t,g, or c
  misc_feature (132): n equals a,t,g, or c
  misc_feature (164): n equals a,t,g, or c
  misc_feature (1346): n equals a,t,g, or c
ggagataattttttaattccagcaaaagcggcacttcccttcgntccaggatgtnaatgttccagccggagatcagtttgatcactgggtttctgatctcatgactcagttcttcagttctccagntcttcntcggtaagcgtgtggcttgcggagatgtcttnatcggcatcagtgactatgactgagtaggtgcccaaatcctcgaggccggttctttcaggatgaccttggacttgytaactttatcctcgatcttgaccctctgggggtccagtgggcccttgtagtctttggaccactgaaactctgaggagtcgggggcttcaggggcttcaaaagccaaatagataaagccctcttcatccacaccaacctcgatctcatgggcacctggcttgtcctccaggagcacgggatcagtgggcatggacggttgccccagaccagctgaattcatggcctgtacctggaacacgtaactctttcctggctgcaagtcggaaaccctcaggtgggtgccagagatggggcctggggtgaccggcttccactgctcagagccttcctcctggaaactgacgtgatagcctgtgacaggcccagcccccatatacagtgggggttcccactgcagcaccagggatgtagcccgcacctcggatgcccgtacatcgtacggggggcctggctggggcattgtccactctttgcactcaaacaggctgctgggtgccgacagctcgccaacacctgcccagttggcagcccgggcacggaactcatagaagtggccttcatgaaggtcactgaccttgcagacccgggtggggatgggctcgtgccgaattcctgcagcccgggggatccactagttctagagcggccgccaccgcggtggagctccagcttttgttccctttagtgagggttaatttcgagcttggcgtaatcatggtcatagctgtttcctgtgtgaaattgttatccgctcacaattccacacaacatacgagccggaagcataaagtgtaaagcctggggtgcctaatgagtgagctaactcacattaattgcgttgcgctcactgcccgctttccagtcgggaaacctgtcgtgccagctgcattaatgaatcggccaacgcgcggggagaggcggtttgcgtattgggcgctcttccgcttcctcgctcactgactcgctgcgctcggtcgttcggctgcggcgagcggtatcagctcactcaaaggcggtaataccggtatycacagaatmaggggataccaggaaagaacatgtgagcaaaaggccagcaaaaggccaggaacccgtaaaaaggcccncgttgctgg

SEQ ID NO: 166 - DNA, 1428 bp, Homo sapiens
tgcaaggccaggaagctacagggaaagttctgatcaaaatacacaaagacacaagccaggtccccaccgcgcttggsgatgcatccatagcagccttsgtgctgtggacactccctggggcccagcgaaggggagagtttgctcccaaaggcgcaccaatgaccaacatttgccccccggaggaaagaactggaaccagggtcaaggccaacctgtcagaggtgcttgtgtccagtgtcctgggggtcaacgtgaccagcactgaagtctatggggccttcacctgctccatccagaacatcagcttctcctccttcactcttcagagagctggccctacaagccacgtggctgcggtgctggcctccctcctggtcctgctggccctgctgctggccgccctgctctatgtcaagtgccgtctcaacgtgctgctctggtaccaggacgcgtatggggaggtggagataaacgacgggaagctctacgacgcctacgtctcctacagcgactgccccgaggaccgcaagttcgtgaacttcatcctaaagccgcagctggagcggcgtcggggctacaagctcttcctggacgaccgcgacctcctgccgcgcgctgagccctccgccgacctcttggtgaacctgagccgctgccgacgcctcatcgtggtgctttcggacgccttcctgagccgggcctggtgcagccacagcttccgggagggcctgtgccggctgctggagctcacccgcagacccatcttcatcaccttcgagggccagaggcgcgaccccgcgcacccggcgctccgcctgctgcgccagcaccgccacctggtgaccttgctgctctggaggcccggctccgtgactccttcctccgatttttggaaagaagtgcagctggcgctgccgcggaaggtgcggtacaggccggtggaaggagacccccagacgcagctgcaggacgacaaggaccccatgctgattcttcgaggccgagtccctgagggccgggccctggactcagaggtggacccggaccctgagggcgacctgggtgtccgggggcctgtttttggagagccatcagctccaccgcacaccagtggggtctcgctgggagagagccggagcagcgaagtggacgtctcggatctcggctcgcgaaactacagtgcccgcacagacttctactgcctggtgtccaaggatgatatgtagctcccaccccagagtgcaggatcatagggacagcgggggccagggcagcggcgtcgctcctctgctcaacaggaccacaacccctgccagcagccctgggaccctgccagcagccctgggaaaaggctgtggcctcagggcgcctcccagtgccagaaaataaagtccttttggattctgaaaaaaaaaaaaaaaaaaaaaa

SEQ ID NO: 167 - DNA, 2991 bp, Homo sapiens
  misc_feature (2986): n equals a,t,g, or c
gagaagggccgagcacagcatggcggtcaaggtgcagacaactaagcgaggggatcctcatgagttaagaaacatatttctacagtatgccagtactgaggttgatggagagcgttayatgaccccagaagactttgttcagcgctatcttggactgtataatgatccaaatagtaacccaaagatcgtgcagctcttggcaggagtagctgatcaaaccaaggatgggttgatctcctatcaagagtttttggcatttgaatctgttttatgtgctccagattccatgttcatagtggctttccagttgtttgacaagagtggaaatggagaggtgacatttgaaaatgtcaaagaaatttttggacagactattattcatcatcatatcccttttaactgggattgtgaatttatccgactgcattttgggcataaccggaagaagcatcttaactacacagaattcacgcagtttctccaggagctgcaattggaacatgcaagacaagcctttgcactcaaagacaaaagcaaaagtggcatgatttctggtctggatttcagygacatcatggttaccattagatctcacatgcttactccttttgtggaggagaacttagtttcagcagctggaggaagtatctcacaccaggttagcttctcctacttcaatgcatttaactcgttactgaataacatggagcttgttcgtaagatatatagcactctagctggcacaaggaaagatgttgaagtcacaaaggaggaatttgcccagagtgccatacgctatggacaagtcacaccactagaaattgatattctatatcagcttgcagacttatataatgcttcagggcgcttgactttggcagatattgagagaatagccccattggctgagggggccttaccttacaacctggcagaacttcagagacagcagtctcctgggttaggcaggcctatctggctccagattgccgagtctgcttacagattcactctgggctcagttgctggagctgtgggagccactgcagtgtatcctatagatctggtgaagacccgaatgcaaaaccagcgtggctctggctctgttgttggggagctaatgtacaaaaacagctttgactgttttaagaaagtcttgcgttatgagggcttctttggactctacaggggtctgataccacaacttataggggttgctccagaaaaggccattaaactgactgttaatgattttgttcgggacaaatttaccagaagagatggctctgttccacttccagcagaagttcttgctggaggctgtgctggaggctctcaggtcatttttaccaacccattggagatagtgaagattcgtctgcaagtagctggagagatcaccacgggacccagagtcagcgccctgaatgtgctccgggacttgggaatttttggtctgtataagggtgccaaagcgtgtttcctccgagacattcccttctctgcaatctattttcctgtttatgctcattgcaaactacttctggctgatgaaaatggacacgtgggaggtttaaatcttcttgcagctggagccatggcaggtgtcccagctgcatctctggtgacccctgctgatgtcatcaagacaagactgcaggtggctgcccgcgctggccagacgacatacagtggtgtcatcgactgtttcaggaagattctccgggaagaagggccctcagcattttggaaagggactgcagctcgagtgtttcgatcctctccccagtttggtgttaccttggtcacttatgaacttctccagcggtggttttacattgattttggaggcctcaaacccgctggttcagaaccaacacctaagtcacgcattgcagaccttcctcctgccaaccctgatcacatcggtggatacagactcgccacagccacgtttgcaggcatcgaaaacaaatttggcctttatctcccgaaatttaagtctcctagtgttgctgtggttcagccaaaggcagcagtggcagccactcagtgatgagacaactgttgagtgtggcaaaatggcgccttgaagaaagaggcctaggagagcagccctgtaatgtatccagtcagctgcatggtactgactgagctgaggagtcaaactcttctttctgtatgacatatacatatacttgtttataaaataatcatttgcccagggaaaaaaccacaacgctgtttcaagctttagtcttatgtgttgaaatgtttttgtaagccttggcatgaattagtgttctagactctgctttgcacagcttgcacttacagtgattgtacatattgtacatctttgtacagagacatcttggcacctcatcccaacaaatcacatttgtagaaatgtaatgcggttctgagtggcttgaaatgtacagaatgttttgaaagtgttttattaagaatcacacaaaaataaatgtattaaaattaaattcattctcttattggtgacttatggaaataaagcatcaatattggatgtatttaattcctagtttgttttccattctggaataaaaaggtatttgctgataaaaggcataacgagacatagtgctgctaccactgaataagtgatactttggaaagatgcatgccagtggatgccagaggaccaggctaatgacttgtgtgtgctgatgtgtttccatttgtatttaatgtgtgtagaccctcctctgttcatcaatcaaaaagcatttcctaggcagctcctcgcctgtcastgtgcatatggaaacagggacatctccatcattactggcttagttttgctttcctttgacacagtaaggcaaaggccaagctttcaaaagagtaaaggatactttcacaatttcccttcatatggatatgattccagtcaaaaataaaatgcacaccaaaatgtaaaaaaawaaaaaaaaaaaaaaaaaanggggg

SEQ ID NO: 168 - DNA, 3029 bp, Homo sapiens
ggcacgagagaggaccatgtcatacatacaaagtacaaagacttaatgagtcaacatcctataaattctgtattcaagcttgtaatgaagctggggaaggtcccctctcccaagaatatattttcactactccaaaatctgtcccagctgccttgaaagcccccaaaatagagaaagtaaatgatcacatttgtgaaattacatgggagtgtttacagccaatgaaaggtgatccagttatttacagtcttcaagttatgttgggaaaagattcagaattcaaacagatttacaagggtcccgactcttccttccggtattccagccttcagctgaactgtgaatatcgcttccgtgtatgtgccattcgccagtgccaagactctctgggacaccaggacctcgtaggtccctacagcaccacagtgctcttcatctctcagaggactgaaccaccagccagcaccaacagagacactgtggaaagcacaaggacccgacgggcactgagtgacgagcagtgtgctgccgtcatccttgtgctgtttgctttcttttccattttgattgcctttatcattcagtactttgtaatcaagtgaaaatataactttattttttaactctattacattttattttgtcatgtactaaaattatttctgtattgcttttataaaaaacagtggcatttagcactggcattgagactatagcacatcatttttgccattttcagtgcttatattgttaggtagaggctggcactttattagaatgcaagccacaaaaatatcaattttgttttttttgttagggtgggtcttctttttttctttccctctctctttttttaacaaatgccttcttatagaaaaactttctaagaggcaacaatttagaatggatattttgacgaatcggcatgagtgtaacagtgataacctgatctgtttgttttaaagattattaccaagtgaaaaattcagaatgaatagaatttacactaacatgctatataaaatgttaaagtctgatgctgtgaaagcaatctagtgctatatttctacctcctcatttgtcttaattatttggtaagtgggattatgatgagtaactggaggggcttagaaacaaaaactggatgaaagagtatgcatgaagaaaagcttctttgataaatgtggagttcttcattataaatatatattcatgaattcacagataagtacttaaagaacagacagtttacttggcctaaaaatattttgatgtttactcaaaaagtacctcttcaggtcttgagaacatggaaaagaattgagtgcttttaaatactttttagaaagtaatcataaaagtaaattgaatttcaaacctatttggcttctgttttgtgaacctttgaactatatgtatgtgtataagggtatacacatacatatatggcatataacaagtgtacacatatacacataacaagtgtagaagtatatattacatacatacactcactctgtctggtataggctaattttgaagaactcccataagtttctgctgcttctcccataactgctgccaccaccatcagaattcataatcaaacctaacctttttgtttggggcaccaaatctgaagacaaaattaatttgcaccagtaaacttcaagctgctttctttcttgaaaactaaacgtttaacgtataatgtctgtttggatactgttccaaattgttgattgcatgtggttaatgttgcattagagcactttgcaattgcataattcattaatgttttgtgagcttgcatttgtgagttattggatgatcagactgaattttgtcaagtatcacattgtacatcttgcctagatgtcgatgactgcaagtaataatacagtttataatgaaactatctacaattcttgttttagcacatctgttatccgtaaaacacctgtaactagcttttttaatttattatttgaattttaggatagcgaatcactaatttttagttgctgaggttggcattttagtgattattaagcacttctgtcagtctttgaaaaaagaacgtattttttgtgctttgaagatctctgaagaatttcttttataatagaatgggcatgtattgtaacagttttatgtcaaatgatctgtgctgtagaaaaacattaacccttgttcaaaaaagaaatggataaacttggcctttctaagtggtaagaatgacctgtcactataatatactgtatgtttacattttatttaaatttaatctcttatgtatagggtgataaccttccccagaaacaacagtgattgcgattgttttctagaaacttctttaaagtgccacatttggcagtacaaatgagtctgagtgtaatagcccagagatttatatatagttgaatgtctaaaatggtaaaatgtgccactgtgtcaagttacagtggcttatgtttttcatagtaattcaaatgaacttcctatttttgatagtaaatgtcatttaatagtatacttgccatttgagcctcactgcaaaattagtgcagaggagaaaacaatttttaatgtaatcttgattttacctcatatactgtacattccaaaaactctaaactttttaaagattatagatacactaccaaacatatcaccttaaaattgtataaggctgaatgaacttcatacaaatgaaaaaaatctcataaaaatacataaactatgtagcaaaagtatctgtaaaatccatggaaaataaaagttgtatcattctttttgagatacgtttattgtattcatatatattcattatttgctacctgtttaagaaagtgaaatgttatggtctcccctcttccaatgagcttaaaacatttttcccaacagtatataaatcttcaacatgagaggatgtatatttattatataaagcccagtaaagaataaaattagaagttttatcctagtaaaaaaaaaaaaaaaaaaaaaaaaaaaaaaaaaaaaaaaaa

SEQ ID NO: 169 - DNA, 507 bp, Homo sapiens
  misc_feature (453): n equals a,t,g, or c
ggcacgaggcgccttctccccggccactgcttgagccgctgagagggtggcgacgtcggggccatggggctgggcccggtcttcctgcttctggctggcatcttcccttttgcacctccgggagctgctgctgagccccacagtcttcgttataacctcacggtgctgtcctgggatggatctgtgcagtcagggtttcttgctgaggtacatctggatggtcagcccttcctgcgctatgacaggcagaaatgcagggcaaagccccagggacagtgggcagaagatgtcctgggaaataagacatgggacagagagaccagggacttgacagggaacggaaaggacctcaggatgaccctggctcatatcaaggaccagaaagaaggcttgcattccctccargagattarggtctgtgagrtccatgaagacaacagcaacmaggagctncccaagcatttctactacgattgggagctcttcctctcccaaaacgtggagact

SEQ ID NO: 170 - DNA, 1167 bp, Homo sapiens
  misc_feature (3): n equals a,t,g, or c
  misc_feature (287): n equals a,t,g, or c
agnctggaagtcctggatgccagagacccattaggctgccgctgcttccaaatggaggaggctgtcctgcgagcacaaggcaacaagaagctggtcctggtcttgaacaagattgacctggtccccaaggaggttgtggagaaatggctggattaccttcggaatgagttgccaaccgtggctttcaaggccagtacccagcatcaggtcaaaaacctgaatcgttgcagtgtgccagtagatcaggcctctragtcactgctgaaaagcaaagcctgytttggagntgaaaacctcatgagggttctggggaactattgccgccttggtggaagtgcgcacccacattcgtgtgggtrttgtgggtcttcccaatgttgggaagagcagcctgatcaatagcctgaagcgcagccgcgmrtgcagcgtgggagctgttcctggaattaccaaattcatgcaggaggtctacctggacaagttcatccggctcttggatgctccaggcattgtcccagggcccaactcagaggtgggcaccatcctgcgtaactgcgtccacgtgcagaagctggcagaccctgtgaccccagtggagaccatcctgcagcgctgcaacctggaggagatttccaactattatggcgtctctgggttccagaccactgagcactttctgacggcagtggcccaccgtttggggaagaagaagaagggaggcttatatagtcaggaacaggcggccaaagctgtcctagctgactgggtgagcgggaagatcagcttctatataccaccaccagccactcacactctgcccacccatctcagtgctgagatcgttaaggaaatgaccgaggtctttgacatcgaggatactgagcaggccaatgaagacaccatggaatgcttggccaccggagaatctgatgagctgttgggtgacacggacccacttgaaatggagatcaagttgctccattctccgatgacgraaatagcagatgccattgaaaataaaaccaccgtgtataagattggagatctcactgggtattgcaccaatccgaaccgtcatcagatggggtgggctaaacgcaatgtggaccaccgccctaagagcaacagtatggtggatgtctgctcagtggaccgccgttcagtgct

SEQ ID NO: 171 - DNA, 1183 bp, Homo sapiens
  misc_feature (72): n equals a,t,g, or c
ctgtaatatctctttggaaattcaagattgaacctggtcctaggttgtggccccaggcattgggcattttgnaagccccccaggtgttttcagcttgcagccaggccgagagagagcccctgagtcagatccccatggtttaggcacacctagcgggaggggtggctcctggaccccaccgtggttggagagctgagcatgtgtgtggctttagtggggtctgttagttatgggggtctgggcactggagctgcaggacacttgggatcccaggtcagaaagggccagatgagcaactaggaaagacttgggggccagggcggagtggggtcacctgacactcttgtgaggccccttctagtgcctgctcacaccggaatttcattcactccaagaagccatcaggggtaagataccttcctttaaacgtcactaagaaagaagaggcctgccggtgacacagtaagatgccattgatctaaagatgcgtcttgatttcagaaaggtccggaagtggaaagcaggtttcagggctgctgaggtacagggttctcctgtaggccccagggatggtctcaggggtgctgagtgcgtgcgtggtaaatggatggagcccaggggcgcctcctgccagtgtcctccaggcactcaaacctagcccttctgaagccgacctcacgtgacctcacagcccctcctgaaggcgcctcactgatgacggtgggtggaataacagcccccagagatgtccaggtttggaaccccaggacgtgggaaagtgttaccttgcgtggcaaaagggacccggcgcctgtgcttcagttcaggatttcgtggtggggagatgaccgtggatggttgaggtgggccctgagtaatcatgggggcccttataagggaaggggagtcacgagggtctgcgcatgaagcaaggaagcttctggctgtgaagatggcaagaargcctggggccaggcgatgaggtggcccctggaggagctggaaaaggcattggattctgccccagagcctccgtggagaaacaaagccgcactgacaagacttcagcctggtgaaaaccattttggactcctgacctctagaactgtaagataataaattggtgtggttttcaacctctcaaaaaaaaaaaaaaaaaaaaaaaaaaaaaaaaaaaaaaaaa

SEQ ID NO: 172 - DNA, 406 bp, Homo sapiens
  misc_feature (10): n equals a,t,g, or c
tacttcgcancaccgaaagagcgtcgtccgatggttggcggtatgctgctttctgttgctgttactgcgtacgccgattatcgatctggcgctgcatattgttggcggtagtgaggcagtcctggaacaggcgcggcgctttcttgaaatccgctggttaagcgcaccggcgtcgctggcgaatctggtattactcggttggttactcggcgtgcaatatgcccgtgcgccataatwttgttagtggtcggcaatatcctcaacattgtgctggatgtctggctggtgatggggctgcatatgaacgtgcagggcgcggcgctggcgacgkttattgcggaatatgcaacattgctgattggtctgctaatggtgcgtaaaatcctcaaactacgcggaatttcgg

SEQ ID NO: 173 - DNA, 559 bp, Homo sapiens
  misc_feature (134): n equals a,t,g, or c
  misc_feature (140): n equals a,t,g, or c
  misc_feature (476): n equals a,t,g, or c
  misc_feature (527): n equals a,t,g, or c
  misc_feature (540): n equals a,t,g, or c
  misc_feature (550): n equals a,t,g, or c
cggcagtgggattactcagtgttgagagaaacaacacggaaagcccagagcagaggagggagaaggccccattctctcagctttaatctactgcacctcggagggcagagctctaaccagacacgctgcaagcntcagantcgggatgaacatcgaggtggggaacatttcttatacaggagccatcatctcctggtcgtcctcggagccctgcctggaggactattaccatattatgtacaggcccaactggaacagcatcttctctggctatcttcgctacagcttccaccacgaggagaaggtgcctcgaacgatcagctccgtggtgctggaacatcttgccccttccactctctacttcctgtgcatcagctgtaagaaggctgccttcccttacaggcactactgcaccatgttccacaccctggataagagtccgctggctcctggaagctccctgggtagacccccanatctctctttgggtgctgatggccattctgctgggcctgcttcacaagccncttgggcttcatnttgcttcaanattttgggg

SEQ ID NO: 174 - DNA, 338 bp, Homo sapiens
  misc_feature (255): n equals a,t,g, or c
  misc_feature (284): n equals a,t,g, or c
  misc_feature (303): n equals a,t,g, or c
gtttgaagctatggcattcccccactatgagcccacctgtcagccaggctatctgccttgatcctagatgaagtggccattctgcctgcccctcagaacctctctgtactctcaaccaacatgaagcatctcttgatgtggagcccagtgatcgcgcctggagaaacagtgtactattctgtcgaataccaggggtgagttttttcttttaatagttcttctcccttaagcagaattggttcctggaaggcatancccttcctcctgagcccaaggtggctttntgagtccaggggatagatnatccccaaagatctaccccctctgtctgcatgggc

SEQ ID NO: 175 - protein, 116 aa, Homo sapiens
GTQNLQLVCFTELRNREVFGWTGELGPGIYWLIPSTTGCRLRKKIKPVTDEAQLVYRDETGELFLTKEFKSTLSDIFEVIDLDGNGLLSLEEYNFFELRTVVRNVMKMLGASAERI

SEQ ID NO: 176 - protein, 133 aa, Homo sapiens
  misc_feature (38): Xaa equals any of the naturally occurring L-amino acids
  misc_feature (92): Xaa equals any of the naturally occurring L-amino acids
RWRKRNLRTIVQLWILNQTREHLLCQQQPAVPPPPPSXLPLSNAAATDLCLQWFRPTCCTGNSTGIASAPQLSCSVPSANVCSPTTALDAAXCSSSAAAFKQLPAWEPCCCSGKFVQWKTIYISHREVSHSSQ

SEQ ID NO: 177 - protein, 58 aa, Homo sapiens
  misc_feature (2): Xaa equals any of the naturally occurring L-amino acids
KXATAFLNLEPDRCYQVWVMAVNFTGCSLPSERAIFRTGKEMDAKGALEDNAQFFTDS

SEQ ID NO: 178 - protein, 62 aa, Homo sapiens
  misc_feature (18): Xaa equals any of the naturally occurring L-amino acids
  misc_feature (40): Xaa equals any of the naturally occurring L-amino acids
HRAPDHPAQVGGGPCGGXDRAYLEGTCVEWLRRYLENGKXTLQPQNPQRHTEPTNPFLNHEG

SEQ ID NO: 179 - protein, 164 aa, Homo sapiens
SLTRVTASVSVQPTQLGWGSGASPTNLQPWPLTSAAFLRTTPSRSPCGARNPGKRSCPSGRRRCGGWRIWNTYFPVKGEGPRTPLTYFQLQPQALRNQSHETYHTTSTLRARGLAEWYGHPTPGLGPRLHRGPIHLEASQARPCQAQPLPTAARLPPPPNLGWV

SEQ ID NO: 180 - protein, 131 aa, Homo sapiens
  misc_feature (109): Xaa equals any of the naturally occurring L-amino acids
  misc_feature (110): Xaa equals any of the naturally occurring L-amino acids
  misc_feature (111): Xaa equals any of the naturally occurring L-amino acids
  misc_feature (113): Xaa equals any of the naturally occurring L-amino acids
  misc_feature (115): Xaa equals any of the naturally occurring L-amino acids
  misc_feature (117): Xaa equals any of the naturally occurring L-amino acids
  misc_feature (118): Xaa equals any of the naturally occurring L-amino acids
  misc_feature (120): Xaa equals any of the naturally occurring L-amino acids
  misc_feature (125): Xaa equals any of the naturally occurring L-amino acids
  misc_feature (128): Xaa equals any of the naturally occurring L-amino acids
DPRVRRVTAPRTLLLLLWGAVALTETWAGSHSMRYFYTAMSRPGRGEPRFITVGYVDDTLFVRFDSDATSPRKEPRAPWIEQEGPEYWGPGDTDLPRPTHRLYRENLRXXXRXLXPXXGXVFTSXQRXNGC

SEQ ID NO: 181 - protein, 97 aa, Homo sapiens
  misc_feature (26): Xaa equals any of the naturally occurring L-amino acids
  misc_feature (78): Xaa equals any of the naturally occurring L-amino acids
QISKTNTQTYRENLRIALRYYNQSEXGSHTWQTMYGCDVGPDGRLLRGHNQYAYDGKDYIALNEDLSSWTAAGHRGSXSPNASWKRPVEAEPLENLP

SEQ ID NO: 182 - protein, 125 aa, Homo sapiens
  misc_feature (113): Xaa equals any of the naturally occurring L-amino acids
  misc_feature (118): Xaa equals any of the naturally occurring L-amino acids
RFLALYKLEKSSLVSLSLLFPCPCLRNPPFGPSAVAFSANQVPEKLDVVVIGSGFGGLAAAAILAKAGKRVLVLEQHTKAGGCCHTFGKNGLEFDTGKALCGKGLGSMAVCLXKLGAXLVGVILS

SEQ ID NO: 183 - protein, 146 aa, Homo sapiens
  misc_feature (42): Xaa equals any of the naturally occurring L-amino acids
  misc_feature (57): Xaa equals any of the naturally occurring L-amino acids
  misc_feature (113): Xaa equals any of the naturally occurring L-amino acids
  misc_feature (118): Xaa equals any of the naturally occurring L-amino acids
  misc_feature (137): Xaa equals any of the naturally occurring L-amino acids
MEPSFYSSRRPWPLPRPGRVSAGSGWKRPLPGVERGRPGGGXGTRGAAPGGGSGRSXPLLAPRLPLLEVFPHFRVPARPRGAPFISVGYVDDTQFVRFDNDAASPRMVPRAPXDGAGXVRVFGTGRHGAPRDTAQIXELNLRTLRG

SEQ ID NO: 184 - protein, 602 aa, Homo sapiens
SLPGLWCFPVAVISLGPHSGIRMHLSAVFNALLVSVLAAVLWKHVRLREHAATLEEELALSRQATEPAPALRIDYPKALQILMEGGTHMVCTGRTHTDRICRFKWLCYSNEAEEFIFFHGNTSVMLPNLGSRRFQPALLDLSTVEDHNTQYFNFVELPAAALRFMPKPVFVPDVALIANRFNPDNLMHVFHDDLLPLFYTLRQFPGLAHEARLFFMEGWGEGAHFDLYKLLSPKQPLLRAQLKTLGRLLCFSHAFVGLSKITTWYQYGFVQPQGPKANILVSGNEIRQFARFMTEKLNVSHTGVPLGEEYILVFSRTQNRLILNEAELLLALAQEFQMKTVTVSLEDHTFADVVRLVSNASMLVSMHGAQLVTTLFLPRGATVVELFPYAVNPDHYTPYKTLAMLPGMDLQYVAWRNMMPENTVTHPERPWDQGGITHLDRAEQARILQSREVPRHLCCRNPEWLFRIYQDTKVDIPSLIQTIRRVVKGRPGPRKQKWTVGLYPGKVREARCQASVHGASEARLTVSWQIPWNLKYLKVREVKYEVWLQEQGENTYVPYILALQNHTFTENIKPFTTYLVWVRCIFNKILLGPFADVLVCNT

SEQ ID NO: 185 - protein, 120 aa, Homo sapiens
  misc_feature (17): Xaa equals any of the naturally occurring L-amino acids
  misc_feature (40): Xaa equals any of the naturally occurring L-amino acids
  misc_feature (58): Xaa equals any of the naturally occurring L-amino acids
  misc_feature (104): Xaa equals any of the naturally occurring L-amino acids
  misc_feature (107): Xaa equals any of the naturally occurring L-amino acids
HRSPRTNTQTYRENLRXALRYYNQSEAGSHTWQTMYGCDXGPDGRLLRGHNQLAYDGXDYIALNEDLSSWTAADTAAPDHPAQVGSGPCGGTTETYLEGECLDXLPXTWRTGRDAAAPGP

SEQ ID NO: 186 - protein, 49 aa, Homo sapiens
  misc_feature (29): Xaa equals any of the naturally occurring L-amino acids
  misc_feature (41): Xaa equals any of the naturally occurring L-amino acids
SGEPTWRARAWEWLRRYLENGKETLQPRXHPKTHVTHHSLXDHEANLSC

SEQ ID NO: 187 - protein, 92 aa, Homo sapiens
  misc_feature (33): Xaa equals any of the naturally occurring L-amino acids
  misc_feature (90): Xaa equals any of the naturally occurring L-amino acids
  misc_feature (92): Xaa equals any of the naturally occurring L-amino acids
RSSRPTHRTYRENLRIALRYYNQSEAGSHIIQXMYGCDLGPDGRLLRGHDQSAYDGEDYIALNEDLSSWTAAGHRGSDHPAQVGSGPCCXNX

SEQ ID NO: 188 - protein, 315 aa, Homo sapiens
  misc_feature (57): Xaa equals any of the naturally occurring L-amino acids
  misc_feature (219): Xaa equals any of the naturally occurring L-amino acids
  misc_feature (256): Xaa equals any of the naturally occurring L-amino acids
  misc_feature (274): Xaa equals any of the naturally occurring L-amino acids
  misc_feature (282): Xaa equals any of the naturally occurring L-amino acids
  misc_feature (288): Xaa equals any of the naturally occurring L-amino acids
  misc_feature (290): Xaa equals any of the naturally occurring L-amino acids
  misc_feature (296): Xaa equals any of the naturally occurring L-amino acids
  misc_feature (298): Xaa equals any of the naturally occurring L-amino acids
  misc_feature (303): Xaa equals any of the naturally occurring L-amino acids
EPHSLRYNLMVLSQDGSVQSGFLAEGHLDGQPFLRYDRQKRRAKPQGQWAEDVLGAXTWDTETEDLTENGQDLRRTLTHIKDQKGGLHSLQEIRVCEIHEDSSTRGSRHFYYNGELFLSQNLETQESTVPQSSRAQTLAMNVTNFWKEDAMKTKTHYRAMQADCLQKLQRYLKSGVAIRRTVPPMVNVTCSEVSEGNITVTCRASSFYPRNITLTWRQXGVSLSHNTQQWGDVLPDGNGTYQTWVATRIRQGEEQXFTCYMEHSGNHGTHPVPXGKGLVLQXQRTDFXYXSAAMPXFXIIIIXCVPCCKKKTSAA

SEQ ID NO: 189 - protein, 74 aa, Homo sapiens
  misc_feature (10): Xaa equals any of the naturally occurring L-amino acids
  misc_feature (18): Xaa equals any of the naturally occurring L-amino acids
  misc_feature (62): Xaa equals any of the naturally occurring L-amino acids
AGLSPSSPPXSHSMRYFXTAVSRPGRGEPHFIAVGYVDDTHSCGSTATPRVREGSRGRRGWXKRGRSIGTGRHR

SEQ ID NO: 190 - protein, 136 aa, Homo sapiens
  misc_feature (64): Xaa equals any of the naturally occurring L-amino acids
  misc_feature (102): Xaa equals any of the naturally occurring L-amino acids
  misc_feature (105): Xaa equals any of the naturally occurring L-amino acids
  misc_feature (108): Xaa equals any of the naturally occurring L-amino acids
  misc_feature (125): Xaa equals any of the naturally occurring L-amino acids
  misc_feature (135): Xaa equals any of the naturally occurring L-amino acids
MRVTAPRTVLLLLSGALALTETWAGSHSMRYFYTAMSRPGRGEPRFIAVGYVDDTQFVRFDSDXRESEDGAPGHWDRAGGAGVLGPGDTDLQDQHTDLPREXAEXARXLQPERGRVSHPPEDVRXGRGAGRRFFXA

SEQ ID NO: 191 - protein, 171 aa, Homo sapiens
HEVVRPLGAPEARSAGGPQRRNLRGGSQRRRGGLKKMQSSLKLVDCIIEVHDARIPLSGRNPLFQETLGLKPHLLVLNKMDLADLTEQQKIMQHLEGEGLKNVIFTNCVKDENVKQIIPMVTELIGRSHRYHRKENLEYCIMVIGVPNVGKSSLINSLRRQHLRKGTGACG

SEQ ID NO: 192 - protein, 144 aa, Homo sapiens
  misc_feature (2): Xaa equals any of the naturally occurring L-amino acids
  misc_feature (109): Xaa equals any of the naturally occurring L-amino acids
  misc_feature (127): Xaa equals any of the naturally occurring L-amino acids
KXETPSNPVATVKAGERQWCDVGIFKNNTALVSQFYLLPKGKQSISKVGNADVPDYSLLKKQDLVPGTGYRFRVAAINGCGIGPFSKISEFKTCIPGFPGAPSAVRISXNVEGIHLSWEPPTSPSGXYFGIFSLLGYPHSTDTR

SEQ ID NO: 193 - protein, 283 aa, Homo sapiens
  misc_feature (115): Xaa equals any of the naturally occurring L-amino acids
  misc_feature (220): Xaa equals any of the naturally occurring L-amino acids
EDDNLEEGVLEQADIEVRALQVALGAHLRDARRGQRLRSGAHVVVTGPPNAGKSSLVNLLSRKPVSIVSPEPGTTRDVLETPVDLAGFPVLLSDTAGLREGVGPVEQEGVRRARXRLEQADLILAMLDASDLASPSSCNFLATVVASVGAQSPSDSSQRLLLVLNKSDLLSPEGPGPGPDLPPHLLLSCLTGEGLDGLLEALRKELAAVCGDPSTDPPLXTRARHQHHLQGCLDALGHYKQSKDLALAAEALRVARGHLTRLTGGGGTEEILDIIFQDFCVGK

SEQ ID NO: 194 - protein, 132 aa, Homo sapiens
RSRRHSSLPSCCPPQEASMASPTSTNPAHAHFESFLQAQLCQDVLSSFQELCGALGLEPGGGLPQYHKIKDQLNYWSAKSLWTKLDKRAGQPVYQQGRACTSTKCLVVGAGPCGLRVAVELALLGARVVLVE

SEQ ID NO: 195 - protein, 313 aa, Homo sapiens
PVPTSMPCPVLLGPALDLGWRRMELLHRSSERTLSYAKARQEPEEQSLQKLYQNREKSEEQLTLKQEEAFRSYFEIFNGPGEVDAQSLKNILLLMGFSVTLAQVEDALMSADVNGDGRVDFKDFLAVMTDTRRFFCSVEQNALSDMAPHNPHTLLFEILSLLVEMLALPEAVLEEITNYYQKKLKEGTCKAQEMEAAVGRLRLQKLPYNPQQEESSEVPERKVLSILSRLKQQNYAPNLQSPYAQVPCILLCPQLDKKMVRRQPSNHYALDQCTPPGLDPDIRSPFFQSGSQGNREHNSDSRKWLSSVPARTH

SEQ ID NO: 196 - protein, 299 aa, Homo sapiens
GTSSFLSIKSTLKDEIIERNIILEKVTQRDLRRKFVCFVQNSIGNTTQSVQLKEKRGVVLLYILLGTIGTLVAVLAASALLYRHWIEIVLLYRTYQSKDQTLGDKKDFDAFVSYAKWSSFPSEATSSLSEEHLAQSLFPDVLENKYGYSLCLLERDVAPGGVYAEDIVSIIKRSRRGIFILSPNYVNGPSIFELQAAVNLALDDQTLKLILIKFCYFQEPESLPHLVKKALRVLPTVTCRGLKSVPPNSRFWAKMRYHMPVKNSQGFTWNQLRITSRIFQWKGLSRTETTGRSSQPKEW

SEQ ID NO: 197 - protein, 1035 aa, Homo sapiens
  misc_feature (975): Xaa equals any of the naturally occurring L-amino acids
  misc_feature (980): Xaa equals any of the naturally occurring L-amino acids
  misc_feature (996): Xaa equals any of the naturally occurring L-amino acids
  misc_feature (1011): Xaa equals any of the naturally occurring L-amino acids
  misc_feature (1016): Xaa equals any of the naturally occurring L-amino acids
  misc_feature (1026): Xaa equals any of the naturally occurring L-amino acids
  misc_feature (1028): Xaa equals any of the naturally occurring L-amino acids
QGKSNRTMAQFPTPFGGSLDIWAITVEERAKHDQQFHSLKPISGFITGDQARNFFFQSGLPQPVLAQIWALADMNNDGRMDQVEFSIAMKLIKLKLQGYQLPSALPPVMKQQPVAISSAPAFGMGGIASMPPLTAVAPVPMGSIPVVGMSPTLVSSVPTAAVPPLANGAPPVIQPLPAFAHPAATLPKSSSFSRSGPGSQLNTKLQKAQSFDVASVPPVAEWAVPQSSRLKYRQLFNSHDKTMSGHLTGSCLGPQARTILMQSSLPQAQLASIWNLSDIDQDGKLTAEEFILAMHLIDVAMSGQPLPPVLPPEYIPPSFRRVRSGSGISVISSTSVDQRLPEEPVLEDEQQQLEKKLPVTFEDKKRENFERGNLELEKRRQALLEQQRKEQERLAQLERAEQERKERERQEQERKRQLELEKQLEKQRELERQREEERRKEIERREAAKRELERQRQLEWERNRRQELLNQRNKEQEDIVVLKAKKKTLEFELEALNDKKHQLEGKLQDIRCRLTTQRQEIESTNKSRELRIAEITHLQQQLQESQQMLGRLIPEKQILNDQLKQVQQNSLHRDSLVTLKRALEAKELARQHLRDQLDEVEKETRSKLQEIDIFNNQLKELREIHNKQQLQKQKSMEAERLKQKEQERKIIELEKQKEEAQRRAQERDKQWLEHVQQEDEHQRPRKLHEEEKLKREESVKKKDGEEKGKQEAQDKLGRLFHQHQEPAKPAVQAPWSTAEKGPLTISAQENVKVVYYRALYPFESRSHDEITIQPGDIVMVDESQTGEPGWLGGELKGKTGWFPANYAEKIPENEVPAPVKPVTDSTSAPAPKLALRETPAPLAVTSSEPSTTPNNWADFSSTWPTSTNEKPETDNWDAWAAQPSLTVPSAGQLRQRSAFTPATATGSSPSPVLGQPDFLLHPSMRLGHMQPRIVLLFPDPLQCSTSRLLPMLRPRPGVPFLRSPSCQSPSHPSRXISDAXPSVKFTLMPPGRIHPXFLFIPAVNSRNSFLXYFILXGGTLGWFYLXLXHYLGITC

SEQ ID NO: 198 - protein, 224 aa, Homo sapiens
  misc_feature (183): Xaa equals any of the naturally occurring L-amino acids
  misc_feature (202): Xaa equals any of the naturally occurring L-amino acids
FSPLISARFGMGSMPNLSIPQPLPPAAPITSLSSATSGTNLPPLMMPTPLVPSVSTSSLPNGTASLIQPLPIPYSSSTLPHGSSYSLMMGGFGGASIQKAQSLIDLGSSSSTSSTASLSGNSPKTGTSEWAVPQPTRLKYRQKFNTLDKSMSGYLSGFQARNALLQSNLSQTQLATIWTLADXDGDGQLKAEEFILAMHLTXMAKAGQPLPLTLPPELVPPSFR

SEQ ID NO: 199 - protein, 125 aa, Homo sapiens
GQWSTQQAANMLCLCLYVPVIGEAQTEFQYFESKGLPAELKSIFKLSVFIPSQEFSTYRQWKQKIVQAGDKDLDGQLDFEEFVHYLQDHEKKLRLVFKSLDKKNDGRIDAQEIMQSLRDFGSQDI

SEQ ID NO: 200 - protein, 204 aa, Homo sapiens
  misc_feature (18): Xaa equals any of the naturally occurring L-amino acids
  misc_feature (35): Xaa equals any of the naturally occurring L-amino acids
SSKLPSLKEQKLDSTALXAALELVDPPGCRNSARXSVVVVAMFFSEARARSRTWEASPSEHRKWVEVFKACDEDHKGYLSREDFKTAVVMLFGYKPSKIEVDSVMSSINPNTSGILLEGFLNIVRKKKEAQRYRNEVRHIFTAFDTYYRGFLTLEDFKKAFRQVAPKLPERTVLEVFREVDRDSDGHVSFRDFEYALNYGQKEA

SEQ ID NO: 201 - protein, 149 aa, Homo sapiens
  misc_feature (111): Xaa equals any of the naturally occurring L-amino acids
  misc_feature (133): Xaa equals any of the naturally occurring L-amino acids
PRLQVPVRNSRVDPRFRWERILEIFFRHLFAQVLDINQADAGTLPLDSSQKVREALTCELSRAEFAESLGLKPQDMFVESMFSLADKDGNGYLSFREFLDILVVFMKGSPXDKSRLMFTMYDLDENGFLSKDXFFTMMRSFIEIFQQLP

SEQ ID NO: 202 - protein, 244 aa, Homo sapiens
  misc_feature (27): Xaa equals any of the naturally occurring L-amino acids
  misc_feature (155): Xaa equals any of the naturally occurring L-amino acids
  misc_feature (169): Xaa equals any of the naturally occurring L-amino acids
  misc_feature (220): Xaa equals any of the naturally occurring L-amino acids
  misc_feature (222): Xaa equals any of the naturally occurring L-amino acids
GDFLGQAVCASGTMLRWLRDFVLPTAXCQDAEQPTRYETLFQALDRNGDGVVDIGELQEGLRNLGIPLGQDAEEKIFTTGDVNKDGKLDFEEFMKYLKDHEKKMKLAFKSLDKNNDGKIEASEIVQSLQTLGLTISEQQAELILQSIDVDGTMTXDWNEWRDYFLFNPXTDIEEIIRFWKHSTGIDIGDSLTIPDEFTEDEKKSGQWWRQLLAGGIAGAXSXTSTGPLDRLKIMMQVTGQNQTK

SEQ ID NO: 203 - protein, 149 aa, Homo sapiens
  misc_feature (60): Xaa equals any of the naturally occurring L-amino acids
  misc_feature (88): Xaa equals any of the naturally occurring L-amino acids
ESGGSPAEAGEQPTMEPQKIMPPSKPHPPVVGKVTHHSIELYWDLEKKAKRQGPQEQWFXFSIEEEDPKMHTYGIIYTGYATKHVVEXLEPRTLYRFRLKVTSPSGECEYSPLVSVSTTREPISSEHLQRAVSVNDEDLLVRILQRRPC

SEQ ID NO: 204 - protein, 168 aa, Homo sapiens
  misc_feature (22): Xaa equals any of the naturally occurring L-amino acids
  misc_feature (55): Xaa equals any of the naturally occurring L-amino acids
  misc_feature (76): Xaa equals any of the naturally occurring L-amino acids
  misc_feature (77): Xaa equals any of the naturally occurring L-amino acids
  misc_feature (147): Xaa equals any of the naturally occurring L-amino acids
  misc_feature (159): Xaa equals any of the naturally occurring L-amino acids
  misc_feature (165): Xaa equals any of the naturally occurring L-amino acids
QGKLRTMMAQFPTAMNGGPNMXAITSEERTKHDRQFDNLKPSGGYITGDQARNFXLQSGLPAPVLAEIWALSDLNXXGKMDQQEFSIAMKLIKLKLQGQQLPVVLPPIMKQPPMFSPLISARFGMGSMPNLSIPQPLPPAAPITSLXSATSGTNLSSLXDAHSPXAFC

SEQ ID NO: 205 - protein, 579 aa, Homo sapiens
VPGRNQLVIPTFRPVSCSSPACFCVLAPCLISRPPPRERVKAMFYHAYDSYLENAFPFDELRPLTCDGHDTWGSFSLTLIDALDTLLILGNVSEFQRVVEVLQDSVDFDIDVNASVFETNIRVVGGLLSAHLLSKKAGVEVEAGWPCSGPLLRMAEEAARKLLPAFQTPTGMPYGTVNLLHGVNPGETPVTCTAGIGTFIVEFATLSSLTGDPVFEDVARVALMRLWESRSDIGLVGNHIDVLTGKWVAQDAGIGAGVDSYFEYLVKGAILLQDKKLMAMFLEYNKAIRNYTRFDDWYLWVQMYKGTVSMPVFQSLEAYWPGLQSLIGDIDNAMRTFLNYYTVWKQFGGLPEFYNIPQGYTVEKREGYPLRPELIESAMYLYRATGDPTLLELGRDAVESIEKISKVECGFATIKDLRDHKLDNRMESFFLAETVKYLYLLFDPTNFIHNNGSTFDTVITPYGECILGAGGYIFNTEAHPIDPAALHCCQRLKEEQWEVEDLMREFYSLKRSRSKFQKNTVSSGPWEPPARPGTLFSPENHDQARERKPAKQKVPLLSCPSQPFTSKLALLGQVFLDSS

SEQ ID NO: 206 - protein, 223 aa, Homo sapiens
  misc_feature (24): Xaa equals any of the naturally occurring L-amino acids
PQDSLYQELLQTTRWFIQLFLHHXAQAPLRGTVMQAPAVRQVNPQNSVTVRVPQTTTYVVNNGLTLGSTGPQLTVHHRPPQVHTEPPRPVHPAPLPEAPQPQRLPPEAASTSLPQKPHLKLARVQSQNGIVLSWSVLEVDRSCATVDSYHLYAYHEEPSATVPSQWKKIGEVKALPLPMACTLTQFVSGSKYYFAVRAKDIYGRFGPFCDPQSTDVISSTQSS

SEQ ID NO: 207 - protein, 392 aa, Homo sapiens
LTRIFKISDQDNDGTLNDAELNFFQRICFNTPLAPQALEDVKNVVRKHISDGVADSGLTLKGFLFLHTLFIQRGRHETTWTVLRRFGYDDDLDLTPEYLFPLLKIPPDCTTELNHHAYLFLQSTFDKHDLDRDCALSPDELKDLFKVFPYIPWGPDVNNTVCTNERGWITYQGFLSQWTLTTYLDVQRCLEYLGYLGYSILTEQESQASAVTVTRDKKIDLQKKQTQRNVFRCNVIGVKNCGKSGVLQALLGRNLMRQKKIREDHKSYYAINTVYVYGQEKYLLLHDISESEFLTEAEIICDVVCLVYDVSNPKSFEYCARIFKQHFMDSRIPCLIVAAKSDLHEVKQEYSISPTDFCRKHKMPPPQAFTCNTADAPSKDIFVKLTTMAMYP

SEQ ID NO: 208 - protein, 184 aa, Homo sapiens
  misc_feature (181): Xaa equals any of the naturally occurring L-amino acids
TTDEDDSEYEDCPEEEEDDWQTCSEEDGPKEEDCSQDWKESSTADSEARSRKTPQKRQIHNFSHLVSKQELLELFKELHTGRKVKDGQLTVGLVGYPNVGKSSTINTIMGNKKVSVSATPGHTKHFQTLYVEPGLCLCDCPGLVMPSFVSTKAEMTCSGILPIDQMRDHVPPVSLISFLLXETL

SEQ ID NO: 209 - protein, 92 aa, Homo sapiens
PDATLIFEIELYAVTKGPRSIETFKQIDMDNDRQLSKAEINLYLQREFEKDEKPRDKSYQDAVLEDIFKKNDHDGDGFISPKEYNVYQHDEL

SEQ ID NO: 210 - protein, 177 aa, Homo sapiens
  misc_feature (125): Xaa equals any of the naturally occurring L-amino acids
ALIRLTIGKAGTPAGTGPEFPGRPTRPHMLVQGLEPNTKYEFAVRLHVDQLSSPWSPVVYHSTLPEAPAGPPVGVKVTLIEDDTALVSWKPPDGPETVVTRYTILYASRKAWIAGEWQVLHREGXITMALLENLVAGNVYIVKISASNEVGEGPFSNSVELAVLPKETSESNQSPSV

SEQ ID NO: 211 - protein, 209 aa, Homo sapiens
  misc_feature (209): Xaa equals any of the naturally occurring L-amino acids
GIFSYIIQEYLCTVQTTLESLSAVADIIVRGPPGPPEDVQVEDISSTTSQLSWRAGPDNNSPIQIFTIQTRTPFSVGWQAVATVPEILNGKTYNATVVGLSPWVEYEFRVVAGNSIGIGEPSEPSELLRTKASVPVVAPVNIHGGGGSRSELVITWESIPEELQNGEGFGYIIMFRPVGSTTWSKEKVSSVESSRFVYRNESIIPLSPX

SEQ ID NO: 212 - protein, 456 aa, Homo sapiens
  misc_feature (3): Xaa equals any of the naturally occurring L-amino acids
  misc_feature (6): Xaa equals any of the naturally occurring L-amino acids
  misc_feature (202): Xaa equals any of the naturally occurring L-amino acids
  misc_feature (430): Xaa equals any of the naturally occurring L-amino acids
  misc_feature (431): Xaa equals any of the naturally occurring L-amino acids
WIXRAXGIRHEVDRLSAAADLIVRGPPGPPEAVTIDEITDTTAQLSWRPGPDNHSPITMYVIQARTPFSVGWQAVSTVPELIDGKTFTATVVGLNPWVEYEFRTVAANVIGIGEPSRPSEKRRTEEALPEVTPANVSGGGGSKSELVITWETVPEELQNGRGFGYVVAFRPYGKMIWMLTVLASADASRYVFRNESVHPFSXFEVKVGVFNNKGEGPFSPTTVVYSAEEEPTKPPASIFARSLSATDIEVFWASPLEKNRGRIQGYEVKYWRHEDKEENARKIRTVGNQTSTKITNLKGSVLYHLAVKAYNSAGTGPSSATVNVTTRKPPPSQPPGNIIWNSSDSKIILNWDQVKALDNESEVKGYKVLYRWNRQSSTSVIETNKTSVELSLPFDEDYIIEIKPFSDGGDGSSSEQIRIPKISNAYARGXXASTSNACTLSAISTIMISLTARSSL

SEQ ID NO: 213 - protein, 76 aa, Homo sapiens
  misc_feature (76): Xaa equals any of the naturally occurring L-amino acids
HYRRYACRYRSGIPGSTHASEVIMTAYNIIGESPASAPVEVFVGEAAPAMAPQNVQVTPLTASQLEVTWDPPPPEX

SEQ ID NO: 214 - protein, 207 aa, Homo sapiens
GTICMPFGGGSPFKRMDSLTSYVCQNIPRHVLEATYGINIITPREDEDPHRPPTSEELLTAYGYMRGFMTAHGQPDQPRSARYILKDYVSGKLLYCHPPPGRDPVTFQHQHQRLLENKMNSDEIKMQLGRNKKAKQIENIVDKTFFHQENVRALTKGVQAVMGYKPGSGVVTASTASSENGAGKPWKKHGNRNKKEKSRRLYKHLDM

SEQ ID NO: 215 - protein, 501 aa, Homo sapiens
GTSGGGAGAMAVLLETTLGDVVIDLYTEERPRACLNFLKLCKIKYYNYCLIHNVQRDFIIQTGDPTGTGRGGESIFGQLYGDQASFFEAEKVPRIKHKKKGTVSMVNNGSDQHGSQFLITTGENLDYLDGVHTVFGEVTEGMDIIKKINETFVDKDFVPYQDIRINHTVILDDPFDDPPDLLIPDRSPEPTREQLDSGRIGADEEIDDFKGRSAEEVEEIKAEKEAKTQAILLEMVGDLPDADIKPPENVLFVCKLNPVTTDEDLEIIFSRFGPIRSCEVIRDWKTGESLCYAFIEFEKEEDCEKAFFKMDNVLIDDRRIHVDFSQSVAKVKWKGKGGKYTKSDFKEYEKEQDKPPNLVLKDKVKPKQDTKYDLILDEQAEDSKSSHSHTSKKHKKKTHHCSEEKEDEDYMPIKNTNQDIYREMGFGHYEEEESCWEKQKSEKRDRTQNRSRSRSRERDGHYSNSHKSKYQTDLYERERSKKRDRSRSPKKSKDKEKSKYR

SEQ ID NO: 216 - protein, 128 aa, Homo sapiens
EEREIGPIIRSLGCCPTEGELHDLIAEVEEEEPTGYIRFEKFLPVMTEILLERKYRPIPEDVLLRAFEVLDSAKRGFLTKDELIKYMTEEGEPFSQEEMEEMLSAAIDPESNSINYKDYITMMVIDEN

SEQ ID NO: 217 - protein, 167 aa, Homo sapiens
ATRAAEHLLPGPPPSLADFRLEAGGKGTERGSGSSKPTGSSRGPRMAKFLSQDQINEYKECFSLYDKQQRGKIKATDLMVAMRCLGAARRQGRCSGTADPRDRRKWRAGFLHFSDHYAHANKTRRPKERNSSSHVDGGQGEERLRHGVRPAVKTHESGGEAHPQGSG

SEQ ID NO: 218 - protein, 148 aa, Homo sapiens
QPRPQNEYKECFSLYDKQQRGKIKATDLMVAMRCLGASPTPGEVQRHLQTHGIDGNGELDFSTFLTIMHMQIKQEDPKKEILLAMLMVDKEKKGYVMASDLRSKLTSLGEKLTHKEVDDLFREADIEPNGKVKYDEFIHKITLPGRDY

SEQ ID NO: 219 - protein, 175 aa, Homo sapiens
  misc_feature (23): Xaa equals any of the naturally occurring L-amino acids
TFEPPFLLFLQGKPPGWVASLGXTRAVMSKIQVSERPLMFLLDTPGVLAPRIESVETGLKLALCGTVLDHLVGEETMADYLLYTLNKHQRFGYVQHYGLGSACDNVERVLKSVAVKLGKTQKVKVLTGTGNVNVIQPNYPAAARDFLQTFRRGLLGSVMLDLDVLRGHPPAETLP

SEQ ID NO: 220 - protein, 129 aa, Homo sapiens
  misc_feature (68): Xaa equals any of the naturally occurring L-amino acids
LTRTPPFSPALPPARGVPGSAVLLFEVELVSREDGLPTGYLFVWHKDPPANLFEDMDLNKDGEVPPEXFSTFIKAQVSEGKGRLMPGQDPEKTIGDMFQNQDRNQDGKITVDELKLKSDEDEERVHEEL

SEQ ID NO: 221 - protein, 369 aa, Homo sapiens
RKPAVPEARSAGTSEAGRSGAEEVSCGSVSGDGAAMRLTPRALCSAAQAAWRENFPLCGRDVARWFPGHMAKGLKKMQSSLKLVDCIIEVHDARIPLSGRNPLFQETLGLKPHLLVLNKMDLADLTEQQKIMQHLEGEGLKNVIFTNCVKDENVKQIIPMVTELIGRSHRYHRKENLEYCIMVIGVPNVGKSSLINSLRRQHLRKGKATRVGGEPGITRAVMSKIQVSERPLMFLLDTPGVLAPRIESVETGLKLALCGTVLDHLVGEETMADYLLYTLNKHQRFGYVQHYGLGSACDNVERVLKSVAVKLGKTQKVKVLTGTGNVNVIQPNYPAAARDFLQTFRRGLLGSVMLDLDVLRGHPPAETLP

SEQ ID NO: 222 - protein, 401 aa, Homo sapiens
  misc_feature (37): Xaa equals any of the naturally occurring L-amino acids
  misc_feature (60): Xaa equals any of the naturally occurring L-amino acids
  misc_feature (62): Xaa equals any of the naturally occurring L-amino acids
  misc_feature (66): Xaa equals any of the naturally occurring L-amino acids
  misc_feature (69): Xaa equals any of the naturally occurring L-amino acids
  misc_feature (71): Xaa equals any of the naturally occurring L-amino acids
  misc_feature (73): Xaa equals any of the naturally occurring L-amino acids
  misc_feature (76): Xaa equals any of the naturally occurring L-amino acids
  misc_feature (177): Xaa equals any of the naturally occurring L-amino acids
ILRRYPVGYQPVAGDPWLKDKNFASRYLMLTVMEFSXGVELRDMVVALLEVWKDNRTDDXPXLHMXLSXIXEXILXAHDTTKMGHLTLEDYQIWSVKNVLANEFLNLLFQVCHIVLGLRPATPEEEGQIIRGWLERESRYGLQAGHNWFIISMQWWQQWKEYVKYDANPVVIEPSSXLNGGKYSFGTAAHPMEQVEDRIGSSLSYVNTTEEKFSDNISTASEASETAGSGFLYSATPGADVCFARQHNTSDNNNQCLLGANGNILLHLNPQKPGAIDNQPLVTQEPVKATSLTLEGGRLKRTPQLIHGRDYEMVPEPVWRALYHWYGANLALPRPVIKNSKTDIPELELFPRYLLFLRQQPATRTQQSNIWVNMGMMSLRMFPQHLPRGNLRMQQEYHAFP

SEQ ID NO: 223 - protein, 186 aa, Homo sapiens
  misc_feature (75): Xaa equals any of the naturally occurring L-amino acids
VPGPLPFCRFQVQGHFVILLTEGLQLAGKQAAHIRKTRHPFQHHRIDLRLNKGVTARPAKFIGHWLNISKTAAFXGEKTHRVPRRSVRQNIIDQADRLHGAQRLVINTNRTRVVDQLIEFLHHQHVNAHLAEIVRHHQPNRAGTSDRHLNAMVNSRLDVRVLYCHFSTSRLGQNVVARTVQRNLFC

SEQ ID NO: 224 - protein, 147 aa, Homo sapiens
  misc_feature (67): Xaa equals any of the naturally occurring L-amino acids
PDEAMEDGEEGSDDEAEWVVTKDKSKYDEIFYNLAPADGKLSGSKAKTWMVGTKLPNSVLGRIWKLXDVDRDGMLDDEEFALPAVRTGGLPPHYRQTPRWKHLEGTTGGTRLLCPPFTPPASRSLRHITHTLAHAGIHPSVIHSNIY

SEQ ID NO: 225 - protein, 143 aa, Homo sapiens
  misc_feature (19): Xaa equals any of the naturally occurring L-amino acids
  misc_feature (21): Xaa equals any of the naturally occurring L-amino acids
KVRLQVPVRNSRVDPRVRXRXGAAQYSPEALASIQNHVRKREAPAPEAESKQTEKDPGVQELEALIDTIQKQLKDHSCKDNIREAFQIYDKEASGYVDRDMFFKICESLNVPVDDSLVKELIRMCSHGEGKINYYNFVRAFSN

SEQ ID NO: 226 - protein, 163 aa, Homo sapiens
DDTDSMYGECRTYIIHYYLMDDTVEIREVHERNDGRDPFPLLMNRQRVPKVLVENAKNFPQCVLEISDQEVLEWYTAKDFIVGKSLTILGRTFFIYDCDPFTRRYYKEKFGITDLPRIDVSKREPPPVKQELPPYNGFGLVEDSAQNCFALIQSSKKRVIKSW

SEQ ID NO: 227 - protein, 180 aa, Homo sapiens
  misc_feature (78): Xaa equals any of the naturally occurring L-amino acids
FTRPSWSTSASRIMASSSSCGSGCPSPAMARLSSSTVMWPSPSWSKARKATCRSSRPALAFFAAVRNSWKLISPSPSXSTSEMSFLSWASERFLPVAFSAAPSSWALMVPFPSVSTAEKAFLYWASSSGVSSPAMPASPAPRGASELLPTGPQPAALRARGPECRQPQGSGQRLSQTVLP

SEQ ID NO: 228 - protein, 341 aa, Homo sapiens
  misc_feature (306): Xaa equals any of the naturally occurring L-amino acids
  misc_feature (338): Xaa equals any of the naturally occurring L-amino acids
KMAAAAGSCARVAAWGGKLRRGLAVSRQAVRSPGPLAAAVAGAALAGAGAAWHHSRVSVAARDGSFTVSAQKNVEHGIIYIGKPSLRKQRFMQFSSLEHEGEYYMTPRDFLFSVMFEQMERKTSVKKLTKKDIEDTLSGIQTAGCGSTFFRDLGDKGLISYTEYLFLLTILTKPHSGFHVAFKMLDTDGNEMIEKREFFKLQKIISKQDDLMTVKTNETGYQEAIVKEPEINTTLQMRFFGKRGQRKLHYKEFRRFMENLQTEIQEMEFLQFSKGLSFMRKEDFAEWLLFFTNTENKGIYWEKCEXGSCQQGRALVWGGFQSFCPFTTRWETLLLPCXCSV

SEQ ID NO: 229 - protein, 178 aa, Homo sapiens
  misc_feature (95): Xaa equals any of the naturally occurring L-amino acids
  misc_feature (149): Xaa equals any of the naturally occurring L-amino acids
RVKAKKNAAPFRSEVCFGKEGLWKLLGGFQETCSKAIRVGVIGFPNVGKSSIINSLKQEQMCNVGVSMGLTRSMQVVPLDKQITIIDSPSFIVSXLNSSSALALRSPASIEVVKPMEAASAILSQADARQVVLKYTVPGYRNSLEFFTXLAQRRGMHQKGGIPNVEGAAKLLWSEWTG

SEQ ID NO: 230 - protein, 275 aa, Homo sapiens
  misc_feature (183): Xaa equals any of the naturally occurring L-amino acids
GRPGVGAREASEPGAGPWGLGGTGSQGCQAPSCAQMDGTETRQRRLDSCGKPGELGLPHPLSTGGLPVASEDGALRAPESQSVTPKPLETEPSRETAWSIGLQVTVPFMFAGLGLSWAGMLLDYFQHWPVFVEVKDLLTLVPPLVGLKGNLEMTLASRLSTAANTGQIDDPQEQHRVISSNLXLIQVQATVVGALGCCGCAAVGRGVSRGSGCRQGGVAVCQQCPHCLPCSLCPGGADGLYSDWCSKARGQPRQHCHAHCSQPGRPHHTVHSGFG

SEQ ID NO: 231 - protein, 366 aa, Homo sapiens
VDPRVRSAGTSEAGRSGAEEVSCGSVSGDGAAMRLTPRALCSAAQAAWRENFPLCGRDVARWFPGHMAKGLKKMQSSLKLVDCIIEVHDARIPLSGRNPLFQETLGLKPHLLVLNKMDLADLTEQQKIMQHLEGEGLKNVIFTNCVKDENVKQIIPMVTELIGRSHRYHRKENLEYCIMVIGVPNVGKSSLINSLRRQHLRKGKATRVGGEPGITRAVMSKIQVSERPLMFLLDTPGVLAPRIESVETGLKLALCGTVLDHLVGEETMADYLLYTLNKHQRFGYVQHYGLGSACDNVERVLKSVAVKLGKTQKVKVLTGTGNVNVIQPNYPAAARDFLQTFRRGLLGSVMLDLDVLRGHPPAETLP

SEQ ID NO: 232 - protein, 112 aa, Homo sapiens
GMALSLGVAMNLRAGRQEVIRTNLPLGFNALLRLVASLRLSCGRSGKGRSVVPEACHLDPSRGCDYPRAPSQVLFVGEESWERVVRDLTVHSLPRYTSFFYPCKEQWGKRLI

SEQ ID NO: 233 - protein, 194 aa, Homo sapiens
RPPRMGKSNSKLKPEVVEELTRKTYFTEKEVQQWYKGFIKDCPSGQLDAAGFQKIYKQFFPFGDPTKFATFVFNVFDENKDGRIEFSEFIQALSVTSRGTLDEKLRWAFKLYDLDNDGYITRNEMLDIVDAIYQMVGNTVELPEEENTPEKRVDRIFAMMDKNADGKLTLQEFQEGSKADPSIVQALSLYDGLV

SEQ ID NO: 234 - protein, 465 aa, Homo sapiens
EDTSSMPFRLLIPLGLLCALLPQHHGAPGPDGSAPDPAHYRERVKAMFYHAYDSYLENAFPFDELRPLTCDGHDTWGSFSLTLIDALDTLLILGNVSEFQRVVEVLQDSVDFDIDVNASVFETNIRVVGGLLSAHLLSKKAGVEVEAGWPCSGPLLRMAEEAARKLLPEYNKAIRNYTRFDDWYLWVQMYKGTVSMPVFQSLEAYWPGLQSLIGDIDNAMRTFLNYYTVWKQFGGLPEFYNIPQGYTVEKREGYPLRPELIESAMYLYRATGDPTLLELGRDAVESIEKISKVECGFATIKDLRDHKLDNRMESFFLAETVKYLYLLFDPTNFIHNNGSTFDAVITPYGECILGAGGYIFNTEAHPIDPAALHCCQRLKEEQWEVEDLMREFYSLKRSRSKFQKNTVSSGPWEPPARPGTLFSPENHDQARERKPAKQKVPLLSCPSQPFTSKLALLGQVFLDSS

SEQ ID NO: 235 - protein, 65 aa, Homo sapiens
PPVKNQQGQDIDDNWVKDRKKEFEELIDSNHDGIVTAEELESYMDPMNEYNALNEISLQSLCRRR

SEQ ID NO: 236 - protein, 211 aa, Homo sapiens
  misc_feature (179): Xaa equals any of the naturally occurring L-amino acids
  misc_feature (199): Xaa equals any of the naturally occurring L-amino acids
SSLPATCQSLLSAAHPCAAVPAQSHLAPWDLSLLFLLSLSAGVLMVCIVIGARKLGVNPDNIATPIAASLGDLITLSILALVSSFFYRHKDSRYLTPLVCLSFAALTPVWVLIAKQSPPIVKILKFGWFPIILAMVISSFGGLILSKTVSKQQYKGMAIFTPVICGVGGNLVAIQTSRXSTYLHMWSVPGVLPLQMKKXWPNPCSTFCTSE

SEQ ID NO: 237 - protein, 144 aa, Homo sapiens
VLPWGLNESQRVVRMVGGCLGGSKSSHSAWEGPILPKCKSSRGVTELANRLVCLVFFLHVDIILLILLPGPPQGYRKVKSSPEPIMSSLLTEGTAGYVVPPGLVLAAGGRCLRVPTVPFCFSECIKGTRTCQWEIHPSGTGREG

SEQ ID NO: 238 - protein, 93 aa, Homo sapiens
DNGSKIQNFVLEWDEGKGNGEFCQCYMGSQKQFKITKLSPAMGCKFRLSARNDYGTSGFSEEVLYYTSGCAPSMPASPVLTKAGITWLSLQWE

SEQ ID NO: 239 - protein, 125 aa, Homo sapiens
QLPNAVKSYFQGISLYLEKKEESLCTWEVGARNHEILLFFIKLASKINSLGTDLCLHEMITIDTLHYIPICLVILKDYLFCLHNEMIESNLSQYLLVMSSNCMIKHPVLRGISSPWMILLIYPCT

SEQ ID NO: 240 - protein, 184 aa, Homo sapiens
MGQCLRYQMHWELEEYQALTFLTRNEILCIHDTFLKLCPPGKYYKEATLTMDQVSSLPALRVNPFRDRICRVFSHKGMFSFEDVLGMASVFSEQACPSLKIEYAFRIYDFNENGFIDEEDLQRIILRLLNSDDMSEDLLMDLTNHVLSESDLDNDNMLSFSEFEHAMAKSPDFMNSFRIRFWGC

SEQ ID NO: 241 - protein, 498 aa, Homo sapiens
  misc_feature (29): Xaa equals any of the naturally occurring L-amino acids
SGDGSLQLCGRGPDSHGHLPNWTAAQTRXHGQQGAADPERRPWSQSPEQQPARPRPPLPPRSSRQAHHLHGSETSVYVTWIPRGNGGFPIQSFRVEYKKLKKVGDWILATSAIPPSRLSVEITGLEKGTSYKFRVRALNMLGESEPSAPSRPYVVSGYSGRVYERPVAGPYITFTDAVNETTIMLKWMYIPASNNNTPIHGFYIYYRPTDSDNDSDYKKDMVEGDKYWHSISHLQPETSYDIKMQCFNEGGESEFSNVMICETKARKSSGQPGRLPPPTLAPPQPPLPETIERPVGTGAMVARSSDLPYLIVGVVLGSIVLIIVTFIPFCLWRAWSKQKHTTDLGFPRSALPPSCPYTMVPLGGLPGHQASGQPYLSGISGRACANGIHMNRGCPSAAVGYPGMKPQQHCPGELQQAFFSQEQMLLLLSEDWKVTWTPRRGRLITLPFEQQSDTSSLLRQTHLGNGYDPQSHQITSCCSPITTAANARSSLLLWASQG

SEQ ID NO: 242 - protein, 189 aa, Homo sapiens
QSPAPLSDPLSRGRCQMSTMGNEASYPAEMCSHFDNDEIKRLGRRFKKLDLDKSGSLSVEEFMSLPELRHNPLVRRVIDVFDTDGDGEVDFKEFILGTSQFSVKGDEEQKLRFAFSIYDMDKDGYISNGELFQVLKMMVGNNLTDWQLQQLVDKTIIILDKDGDGKISFEEFSAVVRDLEIHKKLVLIV

SEQ ID NO: 243 - protein, 814 aa, Homo sapiens
  misc_feature (683): Xaa equals any of the naturally occurring L-amino acids
IFPSSSGGSEQPASPASPLSSRQTSVRRRRQPHPRPAEALPEKLAHGGPWSQGAKEKMKEESWHIHFFEYGRGVCMYRTAKTRALVLKGIPESLRGELWLLFSGAWNEMVTHPGYYAELVEKSTGKYSLATEEIERDLHRSMPEHPAFQNELGIAALRRVLTAYAFRNPTIGYCQAMNIVTSVLLLYGSEEEAFWLLVALCERMLPDYYNTRVVGALVDQGIFEELTRDFLPQLSEKMQDLGVISSISLSWFLTLFLSVMPFESAVVIVDCFFYEGIKVILQVALAVLDANMEQLLGCSDEGEAMTMLGRYLDNVVNKQSVSPPIPHLRALLSSSDDPPAEVDIFELLKVSYEKFSSLRAEDIEQMRFKQRLKVIQSLEDTAKRSVVRAIPVDIGFSIEELEDLYMVFKAKHLASQYWGCSRTMAGRRDPSLPYLEQYRIDASQFRELFASLTPWACGSHTPLLAGRMFRLLDENKDSLINFKEFVTGMSGMYHGDLTEKLKVLYKLHLPPALSPEEAESALEAAHYFTEDSSSEEALPQEEQEGSGSEERGEEKGTSSPDYRHYLRMWAKEKEAQKETIKDLPKMNQEQFIELCKTLYNMFSEDPMEQDLYHAIATVASLLLRIGEVGKKFSARTGRKPRDCATEEDEPPAPELHQDAARELQPPAAGDPQAKAGGDTHLGXAPQESQVVVEGGSGEGQGSPSQLLSDDETKDDMSMSSYSVVSTGSLQCEDLADDTVLVGGEACSPTARIGGTVDTDWCISFEQILASILTESVLVNFFEKRVDIGLKIKDQKKVERQFSTASDHEQPGVSG

SEQ ID NO: 244 - protein, 235 aa, Homo sapiens
HEWWVNHTEVTIPYLATDVTCVGPGAHKGQSVISLDLYTCELDLTNLILFSLSISVSLFLMVMMTASHLYFWDVWYIYHFCKAKIKGYQRLISPDCCYDAFIVYDTKDPAVTEWVLAELVAKLEDPREKHFNLCLEERDWLPGQPVLENLSQSIQLSKKTVFVMTDKYAKTENFKIAFYLSHQRLMDEKVDVIILIFLEKPFQKSKFLQLRKRLCGSSVLEWPTNPQAHPYFWQC

SEQ ID NO: 245 - protein, 210 aa, Homo sapiens
SVTVSHHSHMGPSNCRKTSSGLLLILHYGELYNYFIIYYNVIIIEIKCTINVMHLNHPKTIPCHPSVEKLSLMPKRLGTAELDFSTHPSSFLLLALNRVRNENTVYCRPASMRPWGLWMNSKEILVAGASPRHKRSHFRIRMLIFCSTSIFSKDLVNSTKDTAPSPSSSASCTVRSAMFSSCSSVTCTPTIRRRTCSISCLEIFPSRSRS

SEQ ID NO: 246 - protein, 214 aa, Homo sapiens
NDRVGLLQRQLLQLPQAFADCDGFKIPILGVHLKDLIAVHVIFPDWTEENKVNIVKMHQLSVTLSELVSLQNASHHLEPNMDLINLLTLSLDLYHTEDDIYKLSLVLEPRNSKSQPTSPTTPNKPVVPLEWALGVMPKPDPTVINKHIRKLVESVFRNYDHDHDGYISQEDFESIAANFPFLDSFCVLDKDQDGLISKDEMMAYFLRAKSQLHC

SEQ ID NO: 247 - protein, 214 aa, Homo sapiens
  misc_feature (47): Xaa equals any of the naturally occurring L-amino acids
FCFSCFLVHVKKYLCLLYNCVYLIFLTVLIDSIYKVTEGRQSEIFHXQAEGNFDPSCCFTIYHGNHMESLDLITSNPEEARTWITGLKYLMAGISDEDSLAKRQRTHDQWVKQTFEEADKNGDGLLNIEEIHQLMHKLNVNLPRRKVRQMFQEADTDENQGTLTFEEFCVFYKMMSLRRDLYLLLLSYSDKKDHLTVEELAQFLKVEQKVSLDC

SEQ ID NO: 248 - protein, 122 aa, Homo sapiens
  misc_feature (14): Xaa equals any of the naturally occurring L-amino acids
  misc_feature (120): Xaa equals any of the naturally occurring L-amino acids
HEYEFKVRPSSGRXRGPDSNVLLLRLPEKVPSAPPQEVTLKPGNGTVFVSWVPPPAENHNGIIRGYQVWSLGNTSLPPANWTVVGEQTQLEIATHMPGSYCVQWLQSLVLELGSPVDLSXSF

SEQ ID NO: 249 - protein, 710 aa, Homo sapiens
  misc_feature (439): Xaa equals any of the naturally occurring L-amino acids
WSKPEGCSPEEVITYTLEIQEDENDNLFHPKYTGEDLTCTVKNLKRSTQYKFRLTASNTEGKSCPSEVLVCTTSPDRPGPPTRPLVKGPVTSHGFSVKWDPPKDNGGSEILKYLLEITDGNSEANQWEVAYSGSATEYTFTHLKPGTLYKLRACCISTGGHSQCSESLPVRTLSIAPGQCRPPRVLGRPKHKEVHLEWDVPASESGCEVSEYSVEMTEPEDVASEVYHGPELECTVGNLLPGTVYRFRVRALNDGGYGPYSDVSEITTAAGPPGQCKAPCISCTPDGCVLVGWESPDSSGADISEYRLEWGEDEESLELIYHGTDTRFEIRDLLPAAQYCCRLQAFNQAGAGPYSELVLCQTPASAPDPVSTLCVLEEEPLDAYPDSPSACLVLNWEEPCNNGSEILAYTIDLGDTSITVGNTTMHVMKDLLPETTYRXRIQAINEIGAGPFSQFIKAKTRPLPPLPPRLECAAAGPQSLKLKWGDSNSKTHAAEDIVYTLQLEDRNKRFISIYRGPSHTYKVQRLTEFTCYSFRIQAASEAGEGPFSETYTFSTTKSVPPTIKAPRVTQLEGNSCEILWETVPSMKGDPVNYILQVLVGRESEYKQVYKGEEATFQISGLQTNTDYRFRVCACRRCLDTSQELSGAFSPSAAFVLQRSEVMLTGDMGSLDDPKMKSMMPTDEQFAAIIVLGFATLSILFAFILQYFLMK

SEQ ID NO: 250 - protein, 254 aa, Homo sapiens
EKPLNDTVTEYEVISRENGSFSGKNKSIQMTNQTFSTVENLKPNTSYEFQVKPKNPLGEGPVSNTVAFSTESADPRVSEPVSAGRDAIWTERPFNSDSYSECKGKQYVKRTWYKKFVGVQLCNSLRYKIYLSDSLTGKFYNIGDQRGHGEDHCQFVDSFLDGRTGQQLTSDQLPIKEGYFRAVRQEPVQFGEIGGHTKSIMFSGMNVGLQFLENGRCCTKLPSVSSLQTKIIENTMPHSFKAILFTMYKSLQSN

SEQ ID NO: 251 - protein, 385 aa, Homo sapiens
  misc_feature (8): Xaa equals any of the naturally occurring L-amino acids
  misc_feature (15): Xaa equals any of the naturally occurring L-amino acids
ADAWAAAXRVGSNRXRARAGGGAMACAGLLTVCLLRPPAPQPQPQTPRHPQLAPDPGPAGHTLFQDVFRRADKNDDGKLSFEEFQNYFADGVLSLGELQELFSGIDGHLTDNLETEKLCDYFSEHLGVYRPVLAALESLNRAVLAAMDATKLEYERASKVDQFVTRFLLRETVSQLQALQSSLEGASDTLEAQAHGWRSDAESVEAQSRLCGSRRAGRRALRSVSRSSTWSPGSSDTGRSSEAEMQWRLQVNRLQELIDQLECKAPRLEPLREEDLAKGPDLHILMAQRQVQVAEEGLQDFHRALRCYVDFTGAQSHCLHVSAQKMLDGASFTLYEFWQDEASWRRHQQSPGSKAFQRILIDHLRAPDTLTTVFFPASWWIMNNN

SEQ ID NO: 252 - protein, 373 aa, Homo sapiens
PDVKTSGCSTAPRLEPQEPNSATSTTIAVYWSMNKEDVIDSFQVYCMEEPQDDQEVNELVEEYRLTVKESYCIFEDLEPDRCYQVWVMAVNFTGCSLPSERAIFRTAPSTPVIRAEDCTVCWNTATIRWRPTTPEATETYTLEYCRQHSPEGEGLRSFSGIKGLQLKVNLQPNDNYFFYVRAINAFGTSEQSEAALISTRGTRFLLLRETAHPALHISSSGTVISFGERRRLTEIPSVLGEELPSCGQHYWETTVTDCPAYRLGICSSSAVQAGALGQGETSWYMHCSEPQRYTFFYSGIVSDVHVTERPARVGILLDYNNQRLIFINAESEQLLFIIRHRFNEGVHPAFALEKPGKCTLHLGIEPPDSVRHK

SEQ ID NO: 253 - protein, 482 aa, Homo sapiens
  misc_feature (12): Xaa equals any of the naturally occurring L-amino acids
  misc_feature (14): Xaa equals any of the naturally occurring L-amino acids
  misc_feature (15): Xaa equals any of the naturally occurring L-amino acids
RVCESCPLPHVXRXXRPLPAGSARLPSSRRVLLGLSEPHTPRSSCHSRRLRGGSPAPRLSLGAASPRPRPPSLPLPLPLPFPLFLPTRPAERAWIRSRRASEWVGKMEVPRLDHALNSPTSPCEEVIKNLSLEAIQLCDRDGNKSQDSGIAEMEELPVPHNIKISNITCDSFKISWEMDSKSKDRITHYFIDLNKKENKNSNKFKHKDVPTKLVAKAVPLPMTVRGHWFLSPRTEYTVAVQTASKQVDGDYVVSEWSEIIEFCTADYSKVHLTQLLEKAEVIAGRMLKFSVFYRNQHKEYFDYVREHHGNAMQPSVKDNSGSHGSPISGKLEGIFFSCSTEFNTGKPPQDSPYGRYRFEIAAEKLFNPNTNLYFGDFYCMYTAYHYVILVIAPVGSPGDEFCKQRLPQLNSKDNKFLTCTEEDGVLVYHHAQDVILEVIYTDPVDLSLGTVAEITGHQLMSLSTANAKKDPSCKTCNISVGR

SEQ ID NO: 254 - protein, 344 aa, Homo sapiens
FSLEALQTIHKQMDDDKDGGIEVEESDEFIREDMKYKDATNKHSHLHREDKHITIEDLWKRWKTSEVHNWTLEDTLQWLIEFVELPQYEKNFRDNNVKGTTLPRIAVHEPSFMISQLKISDRSHRQKLQLKALDVVLFGPLTRPPHNWMKDFILTVSIVIGVGGCWFAYTQNKTSKEHVAKMMKDLESLQTAEQSLMDLQERLEKAQEENRNVAVEKQNLERKMMDEINYAKEEACRLRELREGAECELSRRQYAEQELEQVRMALKKAEKEFELRSSWSVPDALQKWLQLTHEVEVQYYNIKRQNAEMQLAIAKDEAEKKKKRAAALEDPSLRTRACDVIALL

SEQ ID NO: 255 - protein, 221 aa, Homo sapiens
LSAAFFPGLQVLIGDVEDAICLHAFYYAIWKRYGALPERYNWQLQAPDVLFYPLRPELVESTYLLYQATKNPFYLHVGMDILQSLEKYTKVKCGYATLHHVIDKSTEDRMESFFLSETCKYLYLLFDEDNPVHKSGTRYMFTTEGHIVSVDEHLRELPWKEFFSEEGGQDQGGKSVHRPKPHELKVINSSSNCNRVPDERRYSLPLKSIYMRQIDQMVGLI

SEQ ID NO: 256 - protein, 177 aa, Homo sapiens
  misc_feature (4): Xaa equals any of the naturally occurring L-amino acids
  misc_feature (7): Xaa equals any of the naturally occurring L-amino acids
  misc_feature (8): Xaa equals any of the naturally occurring L-amino acids
  misc_feature (9): Xaa equals any of the naturally occurring L-amino acids
RLSXRDXXXRLQVPVRNSRVDPRVRKNPFYLHVGMDILQSLEKYTKVKCGYATLHHVIDKSTEDRMESFFLSETCKYLYLLFDEDNPVHKSGTRYMFTTEGHIVSVDEHLRELPWKEFFSEEGGQDQGGKSVHRPKPHELKVINSSSNCNRVPDERRYSLPLKSIYMRQIDQMVGLI

SEQ ID NO: 257 - protein, 483 aa, Homo sapiens
  misc_feature (22): Xaa equals any of the naturally occurring L-amino acids
  misc_feature (24): Xaa equals any of the naturally occurring L-amino acids
  misc_feature (29): Xaa equals any of the naturally occurring L-amino acids
  misc_feature (31): Xaa equals any of the naturally occurring L-amino acids
TFDMINMLKLGYFPGQCEWIYXPXDAISXVXASEKSTGKIFIYDGRGDNQPLHIFDKLHTSPLTQIRLNPVYKAVVSSDKSGMIEYWTGPPHEYKFPKNVNWEYKTDTDLYEFAKCKAYPTSVCFSPDGKKIATIGSDRKVRIFRFVTGKLMRVFDESLSMFTELQQMRQQLPDMEFGRRMAVERELEKVDAVRLINIVFDETGHFVLYGTMLGIKVINVETNRCVRILGKQENIRVMQLALFQGIAKKHRAATTIEMKASENPVLQNIQADPTIVCTSFKKNRFYMFTKREPEDTKSADSDRDVFNEKPSKEEVMAATQAEGPKRVSDSAIIHTSMGDIHTKLFPVECPKTVENFCVHSRNGYYNGHTFHRIIKGFMIQTGDPTGTGMGGESIWGGEFEDEFHSTLRHDRPYTLSMANAGSNTNGSQFFITVVPTPWLDNKHTVFGRVTKGMEVVQRISNVKVNPKTDKPYEDVSIINITVK

SEQ ID NO: 258 - protein, 149 aa, Homo sapiens
ARAQAWQSLQGRQNMTLTCVFWDVTKGTTGDWSSEGCSTEVRPEGTVCCCDHLTFFALLLRPTLDQSTVHILTRISQAGCGVSMIFLAFTIILYAFLRCLHLLLVHHPLPPKSEHHSLLFYCKIGPGPLRISRIGRHGPAIWTQLWLSV

SEQ ID NO: 259 - protein, 212 aa, Homo sapiens
HEPIPTRVCKVSDLHEGHFYEFRARAANWAGVGELSAPSSLFECKEWTMPQPGPPYDVRASEVRATSLVLQWEPPLYMGAGPVTGYHVSFQEEGSEQWKPVTPGPISGTHLRVSDLQPGKSYVFQVQAMNSAGLGQPSMPTDPVLLEDKPGAHEIEVGVDEEGFIYLAFEAPEAPDSSEFQWSKDYKGPLDPQRVKIEDKVNKSKVILKEPG

SEQ ID NO: 260 - protein, 212 aa, Homo sapiens
  misc_feature (164): Xaa equals any of the naturally occurring L-amino acids
  misc_feature (165): Xaa equals any of the naturally occurring L-amino acids
  misc_feature (167): Xaa equals any of the naturally occurring L-amino acids
  misc_feature (168): Xaa equals any of the naturally occurring L-amino acids
  misc_feature (193): Xaa equals any of the naturally occurring L-amino acids
  misc_feature (207): Xaa equals any of the naturally occurring L-amino acids
  misc_feature (212): Xaa equals any of the naturally occurring L-amino acids
AARVPNASQPVSGSRSRPQPGRIMAAAKVALTKRADPAELRTIFLKYASIEKNGEFFMSPNDFVTRYLNIFGESQPNPKTVELLSGVVDQTKDGLISFQEFVAFESVLCAPDALFMVAFQLFDKAGKGEVTFEDVKQVFGQTTIHQHIPFNWDSEFVQLHFGKXXKXXPDICGIYSVFIWKSTGARQASLCAXGHARTGRVQPSIPXIWHIX

SEQ ID NO: 261 - protein, 410 aa, Homo sapiens
ARVQGQEATGKVLIKIHKDTSQVPTALGDASIAALVLWTLPGAQRRGEFAPKGAPMTNICPPEERTGTRVKANLSEVLVSSVLGVNVTSTEVYGAFTCSIQNISFSSFTLQRAGPTSHVAAVLASLLVLLALLLAALLYVKCRLNVLLWYQDAYGEVEINDGKLYDAYVSYSDCPEDRKFVNFILKPQLERRRGYKLFLDDRDLLPRAEPSADLLVNLSRCRRLIVVLSDAFLSRAWCSHSFREGLCRLLELTRRPIFITFEGQRRDPAHPALRLLRQHRHLVTLLLWRPGSVTPSSDFWKEVQLALPRKVRYRPVEGDPQTQLQDDKDPMLILRGRVPEGRALDSEVDPDPEGDLGVRGPVFGEPSAPPHTSGVSLGESRSSEVDVSDLGSRNYSARTDFYCLVSKDDM

SEQ ID NO: 262 - protein, 343 aa, Homo sapiens
ARGVESGAKLDNRGPMMWRPSVLLLLLLLRHGAQGKPSPDAGPHGQGRVHQAAPLSDAPHDDAHGNFQYDHEAFLGREVAKEFDQLTPEESQARLGRIVDRMDRAGDGDGWVSLAELRAWIAHTQQRHIRDSVSAAWDTYDTDRDGRVGWEELRNATYGHYAPGEEFHDVEDAETYKKMLARDERRFRVADQDGDSMATREELTAFLHPEEFPHMRDIVIAETLEDLDRNKDGYVQVEEYIADLYSAEPGEEEPAWVQTERQQFWDFRDLNKDGHLDGSEVGHWVLPPAQDQPLVEANHLLHESDTDKDGRLSKAEILGNWNMFVGSQATNYGEDLTRHHDEL

SEQ ID NO: 263 - protein, 372 aa, Homo sapiens
PASEHSMAVKVQTTKRGDPHELRNIFLQYASTEVDGERYMTPEDFVQRYLGLYNDPNSNPKIVQLLAGVADQTKDGLISYQEFLAFESVLCAPDSMFIVAFQLFDKSGNGEVTFENVKEIFGQTIIHHHIPFNWDCEFIRLHFGHNRKKHLNYTEFTQFLQELQLEHARQAFALKDKSKSGMISGLDFSDIMVTIRSHMLTPFVEENLVSAAGGSISHQVSFSYFNAFNSLLNNMELVRKIYSTLAGTRKDVEVTKEEFAQSAIRYGQVTPLEIDILYQLADLYNASGRLTLADIERIAPLAEGALPYNLAELQRQQSPGLGRPIWLQIAESAYRFTLGSVAGAVGATAVYPIDLVKTRMQNQRGSGSVVGS

SEQ ID NO: 264 - protein, 220 aa, Homo sapiens
  misc_feature (20): Xaa equals any of the naturally occurring L-amino acids
  misc_feature (25): Xaa equals any of the naturally occurring L-amino acids
EFLSFADDLLSGLGTSCVAXGRSHXEVPEVSIYSVIFKCLEPDGLYKFTLYAVDTRGRHSELSTVTLRTACPLVDDNKAEEIADKIYNLYNGYTSGKEQQMAYNTLMEVSASMLFRVQHHYNSHYEKFGDFVWRSEDELGPRKAHLILRRLERVSSHCSSLLRSAYIQSRVETVPYLFCRSEEVRPAGMVWYSILKDTKITCEEKMVSMARNTYGESKGR

SEQ ID NO: 265 - protein, 65 aa, Homo sapiens
KYINYVAKVSVKSMENKSCIILFEIRLLYSYIFIICYLFKKVKCYGLPSSNELKTFFPTVYKSST

SEQ ID NO: 266 - protein, 352 aa, Homo sapiens
  misc_feature (205): Xaa equals any of the naturally occurring L-amino acids
EGGDVGAMGLGPVFLLLAGIFPFAPPGAAAEPHSLRYNLTVLSWDGSVQSGFLAEVHLDGQPFLRYDRQKCRAKPQGQWAEDVLGNKTWDRETRDLTGNGKDLRMTLAHIKDQKEGLHSLQEIRVCEIHEDNSTRSSQHFYYDGELFLSQNLETEEWTVPQSSRAQTLAMNVRNFLKEDAMKTKTHYHAMHADCLQELRRYLESXVVLRRTVPPMVNVTRSEASEGNITVTCRASSFYPRNIILTWRQDGVSLSHDTQQWGDVLPDGNGTYQTWVATRICRGEEQRFTCYMEHSGNHSTHPVPSGKVLVLQSHWQTFHVSAVAAAALLFLLLLFSMSVVVRRKHQLQRVQSS

SEQ ID NO: 267 - protein, 134 aa, Homo sapiens
  misc_feature (29): Xaa equals any of the naturally occurring L-amino acids
  misc_feature (82): Xaa equals any of the naturally occurring L-amino acids
  misc_feature (86): Xaa equals any of the naturally occurring L-amino acids
  misc_feature (89): Xaa equals any of the naturally occurring L-amino acids
  misc_feature (92): Xaa equals any of the naturally occurring L-amino acids
  misc_feature (97): Xaa equals any of the naturally occurring L-amino acids
  misc_feature (102): Xaa equals any of the naturally occurring L-amino acids
  misc_feature (125): Xaa equals any of the naturally occurring L-amino acids
FSTKGMTADEWAEKMPKGPPPTSPKATAXRDILARLHKAVTSHYHAITQEFENFDTMKTNTISREEFRAICNRRVQILTDEXFDRXWNXMPXMPRGXLNTRXSDKVSSRQSTPMALGLGGPKGQXLRSKTIAYA

SEQ ID NO: 268 - protein, 160 aa, Homo sapiens
  misc_feature (7): Xaa equals any of the naturally occurring L-amino acids
  misc_feature (18): Xaa equals any of the naturally occurring L-amino acids
  misc_feature (58): Xaa equals any of the naturally occurring L-amino acids
  misc_feature (108): Xaa equals any of the naturally occurring L-amino acids
  misc_feature (150): Xaa equals any of the naturally occurring L-amino acids
KISKCDXNRYRQFPGRPXRPGELMAFLLPLIIVLMVKHSDSRTHSLRYFRLGVSDPIXGVPEFISVGYVDSHPITTYDSVTRQKEPRAPWMAENLAPDHWERYTQLLXGWQQMFKVELKRLQRHYNHSGSHTYQRMIGCELLEDGSTTGXLHMHMTGRIS

SEQ ID NO: 269 - protein, 185 aa, Homo sapiens
  misc_feature (25): Xaa equals any of the naturally occurring L-amino acids
  misc_feature (116): Xaa equals any of the naturally occurring L-amino acids
  misc_feature (123): Xaa equals any of the naturally occurring L-amino acids
  misc_feature (124): Xaa equals any of the naturally occurring L-amino acids
  misc_feature (175): Xaa equals any of the naturally occurring L-amino acids
RGRAARAGEMGPRARPALLLLMLLXTAVLQGRLLRSHSLHYLFMGASEQDLGLSLFEALGYVDDQLFVFYDHESRRVEPRTPWVSSRISSQMWLQLSQSLKGGITCSLLTSGLLWXITTTARXXTPCSHPGAVKCKKTTVPRATGSTGMMGRTTLNSALTHWIGEQQNPGPGPPXWSGKGTRFGP

SEQ ID NO: 270 - protein, 122 aa, Homo sapiens
  misc_feature (104): Xaa equals any of the naturally occurring L-amino acids
VLPRRCLVFVVNTMDSSREPTLGRLDAAGFWQVWQRFDADEKGYIEEKELDAFFLHMLMKLGTDDTVMKANLHKVKQQFMTTQDASKDGRIRMKELAGMFLSEXENFLLLFRRENHWTSSVE

SEQ ID NO: 271 - protein, 445 aa, Homo sapiens
  misc_feature (1): Xaa equals any of the naturally occurring L-amino acids
  misc_feature (85): Xaa equals any of the naturally occurring L-amino acids
  misc_feature (120): Xaa equals any of the naturally occurring L-amino acids
  misc_feature (140): Xaa equals any of the naturally occurring L-amino acids
XLEVLDARDPLGCRCFQMEEAVLRAQGNKKLVLVLNKIDLVPKEVVEKWLDYLRNELPTVAFKASTQHQVKNLNRCSVPVDQASXSLLKSKACFGAENLMRVLGNYCRLGEVRTHIRVGXVGLPNVGKSSLINSLKRSRXCSVGAVPGITKFMQEVYLDKFIRLLDAPGIVPGPNSEVGTILRNCVHVQKLADPVTPVETILQRCNLEEISNYYGVSGFQTTEHFLTAVAHRLGKKKKGGLYSQEQAAKAVLADWVSGKISFYIPPPATHTLPTHLSAEIVKEMTEVFDIEDTEQANEDTMECLATGESDELLGDTDPLEMEIKLLHSPMTKIADAIENKTTVYKIGDLTGYCTNPNRHQMGWAKRNVDHRPKSNSMVDVCSVDRRSVLQRIMETDPLQQGQALASALKNKKKMQKRADKIASKLSDSMMSALDLSGNADDGVGD

SEQ ID NO: 272 - protein, 279 aa, Homo sapiens
  misc_feature (80): Xaa equals any of the naturally occurring L-amino acids
  misc_feature (269): Xaa equals any of the naturally occurring L-amino acids
FCVRSVSEAGVGESSAATEPIRVKQALATPSAPYGFALLNCGKNEMVIGWKPPKRRGGGKILGYFLDQHDSEELDWHAVXQQPIPTRVCKVSDLHEGHFYEFRARAANWAGVGELSAPSSLFECKEWTMPQPGPPYDVRASEVRATSLVLQWEPPLYMGAGPVTGYHVSFQEEGSEQWKPVTSGPISGTHLRVSDLQPGKSYVFQVQAMNSAGLGQPSMPTDPVLLEDKPGAHEIEVGVDEEGFIYLAFEAPEAPSPQSSVGPKEYKGXNGTPEGQDRR

SEQ ID NO: 273 - protein, 99 aa, Homo sapiens
  misc_feature (17): Xaa equals any of the naturally occurring L-amino acids
ARATMATDELATKLSRXLQMEGEPQSPSRRVFNPYTEFKEFSRKQIKDMEKMFKQYDAGRDGFIDLMELKLMMEKLGAPQTHLGLKNMIKEVDEDLTAS

SEQ ID NO: 274 - protein, 195 aa, Homo sapiens
LSTGPQLLLSSGRISGLSRASACTRSSTNSSADDILVYRMIPAESRSFLLTDLASGRTYDLCVLAVYEDSATGLTATRPVGCARFSTEPALRPCGAPHAPFLGGTMIIALGGVIVASVLVFIFVLLMRYKVHGGQPPGKAKIPAPVSSVCSQTNGALGPTPTPAPPAPEPAALRAHTVVQLDCEPWGPGHEPVGP

SEQ ID NO: 275 - protein, 69 aa, Homo sapiens
  misc_feature (21): Xaa equals any of the naturally occurring L-amino acids
  misc_feature (42): Xaa equals any of the naturally occurring L-amino acids
GRAPSPPPAALGRPGPGRDLXLPPLHEVFRHRRVPARRGEPXFISVGYVDDSIRAVRQQRREFREGEPR

SEQ ID NO: 276 - protein, 155 aa, Homo sapiens
FFFFFFFFFFFFFVENHTNLLSYSSRGQESKMVFTRLKSCQCGFVSPRRLWGRIQCLFQLLQGPPHRLAPGLLAIFTARSFLASCADPRDSPSLIRAPMITQGPPQPSTVISPPRNPELKHRRRVPFATQGNTFPRPGVPNLDISGGCYSTHRHQ

SEQ ID NO: 277 - protein, 146 aa, Homo sapiens
  misc_feature (58): Xaa equals any of the naturally occurring L-amino acids
  misc_feature (101): Xaa equals any of the naturally occurring L-amino acids
  misc_feature (130): Xaa equals any of the naturally occurring L-amino acids
GAPNRPPAALGGPGPDRDLGRLPLHEVFLHLRVPARRGEPPSSQWATWTTRIREVRQXRRESERGAAGPWIEQEGPEYWDRNTQICKPTHRLTERTCGFAXPVTYNQSEGRVFTPSRGCYGLQRGAGRAXSSAGINQFGYDGKGYI

SEQ ID NO: 278 - protein, 248 aa, Homo sapiens
TSQHRKSVVRWLAVCCFLLLLLRTPIIDLALHIVGGSEAVLEQARRFLEIRWLSAPASLANLVLLGWLLGVQYARAPVILLVVGNILNIVLDVWLVMGLHMNVQGAALATVIAEYATLLIGLLMVRKILKLRGISGEMLKTAWRGNFRRLLALNRDIMLRSLLLQLCFGAITVLGARLGSDIIAVNAVLMTLLTFTAYALDGFAYAVEAHSGQAYGARDGSQLLDVWRAACRQSGIVALLFSVVYLLA

SEQ ID NO: 279 - protein, 264 aa, Homo sapiens
  misc_feature (109): Xaa equals any of the naturally occurring L-amino acids
EKQHGKPRAEEGEGPILSALIYCTSEGRALTRHAASIRIGMNIEVGNISYTGAIISWSSSEPCLEDYYHIMYRPNWNSIFSGYLRYSFHHEEKVPRTISSVVLEHLAPXTLYFLCISCKKAAFPYRHYCTMFHTLDKSPLAPGSSLVDPQISLWVLMAILLACFTAVLAFICLQFWCVRCHEPRWSYRAGHMEEANGLVRWPEEAPDLGQREEDLQGLPLVEMPRKNSRDGAELDPEANQDAPDAGALQRGGGDPPAILPHCGE

SEQ ID NO: 280 - protein, 61 aa, Homo sapiens
  misc_feature (23): Xaa equals any of the naturally occurring L-amino acids
  misc_feature (25): Xaa equals any of the naturally occurring L-amino acids
  misc_feature (35): Xaa equals any of the naturally occurring L-amino acids
RVNLRKLRGYYNQSEDGSHTLQXMXGCNLGPDGRXLRGHNQLAYDGKDYIALNEDLSSWYR

SEQ ID NO: 281 - protein, 103 aa, Homo sapiens
  misc_feature (14): Xaa equals any of the naturally occurring L-amino acids
ARIHQSSCARLHKXTRAMSFNGHSRPSSAEDQAEVIWCTDKPLRSQPPDAGHPLPICFCVLIVCRPCNQYILTPSHSLSLICILKIRTIKLLFTHTLKNPVSP

SEQ ID NO: 282 - protein, 164 aa, Homo sapiens
  misc_feature (52): Xaa equals any of the naturally occurring L-amino acids
  misc_feature (91): Xaa equals any of the naturally occurring L-amino acids
ARAETSSTHSESPVVVDLPDTPFIFKHTVNNSTAVISWTYALGKQPVSFYQXLLQEVAKTQENELPEAKNRPWIFNKILGTTVKLMELKPXTCYCLSVRAANTAGVGKWCKPYKFATLATDFSSFPENYPIQITVRRKEPRQKIVSSGPEEMPEAGGSGIPISW

SEQ ID NO: 283 - protein, 177 aa, Homo sapiens
  misc_feature (112): Xaa equals any of the naturally occurring L-amino acids
  misc_feature (131): Xaa equals any of the naturally occurring L-amino acids
  misc_feature (136): Xaa equals any of the naturally occurring L-amino acids
  misc_feature (142): Xaa equals any of the naturally occurring L-amino acids
  misc_feature (169): Xaa equals any of the naturally occurring L-amino acids
  misc_feature (175): Xaa equals any of the naturally occurring L-amino acids
DPRVRRVTAPRTLLLLLWGAVALTETWAGSHSMRYFYTAMSRPGRGEPRFITVGYVDDTLFVRFDSDATSPRKEPRAPWIEQEGPEYWDRETQISKTNTQTYRENLRTGFRXYNQSEAGSHIIQRMYGCDXGPDGXFSAGIXQDAYDGKDYIALERRLESWTRGHGVSXPGNWSXLC

SEQ ID NO: 284 - protein, 125 aa, Homo sapiens; identical to SEQ ID NO: 182
  misc_feature (113): Xaa equals any of the naturally occurring L-amino acids
  misc_feature (118): Xaa equals any of the naturally occurring L-amino acids

SEQ ID NO: 285 - protein, 185 aa, Homo sapiens
  misc_feature (29): Xaa equals any of the naturally occurring L-amino acids
  misc_feature (151): Xaa equals any of the naturally occurring L-amino acids
  misc_feature (185): Xaa equals any of the naturally occurring L-amino acids
CQRTQSHTLSGPGIRGASPIWTGLSKPLXLQSREVPRHLCCRNPEWLFRIYQDTKVDIPSLIQTIRRVVKGRPGPRKQKWTVGLYPGKVREARCQASVHGASEARLTVSWQIPWNLKYLKVREVKYEVWLQEQGENTYVPYILALQNHTFXENIKPFTTYLVWVRCIFNKILLGPFCRCCLVLQX

SEQ ID NO: 286 - protein, 131 aa, Homo sapiens
  misc_feature (119): Xaa equals any of the naturally occurring L-amino acids
EPHSLRYNLMVLSQDGSVQSGFLAEGHLDGQPFLRYDRQKRRAKPQGQWAEDVLGAKTWDTETEDLTENGQDLRRTLTHIKDQKGGLHSLQEIRVCEIHEDSSTRGSRHFYYGGELLLXQNLEIQDSTMPQ

SEQ ID NO: 287 - protein, 130 aa, Homo sapiens
  misc_feature (14): Xaa equals any of the naturally occurring L-amino acids
  misc_feature (82): Xaa equals any of the naturally occurring L-amino acids
QRWCGPLERRKPAXPEPQRRNLRGGSQRRRGGLKKMQSSLKLVDCIIEVHDARIPLSGRNPLFQETLGLKPHLLVLNKMDLXDLTEQQKIMQHLEGEGLKNVIFTNCVKDENVKQIIPMVTELIGRSHRY

SEQ ID NO: 288 - protein, 151 aa, Homo sapiens
  misc_feature (4): Xaa equals any of the naturally occurring L-amino acids
  misc_feature (73): Xaa equals any of the naturally occurring L-amino acids
  misc_feature (130): Xaa equals any of the naturally occurring L-amino acids
  misc_feature (148): Xaa equals any of the naturally occurring L-amino acids
HVVXTGPPNAGKSSLVNLLSRKPVSIVSPEPGTTRDVLETPVDLAGFPVLLSDTAGLREGVGPWSRRACGAPXERLEQADLILAMLDASDLASPSSCNFLATVVASVGAQSPSDSSQRLPPGAEQFGPAXPGGPSSGSDCPAMLCLFXGKG

SEQ ID NO: 289 - protein, 111 aa, Homo sapiens
  misc_feature (67): Xaa equals any of the naturally occurring L-amino acids
  misc_feature (91): Xaa equals any of the naturally occurring L-amino acids
  misc_feature (100): Xaa equals any of the naturally occurring L-amino acids
ATPRRGRSRKEQSLQKLYQNREKSEEQLTLKQEEAFRSYFEIFNGPGEVDAQSLKNILLLMGFSVTXAQVEDALMSADVNGDGRVDFKDFXAVMTDTRRXFCSVEQNALSD

SEQ ID NO: 290 - protein, 188 aa, Homo sapiens
  misc_feature (120): Xaa equals any of the naturally occurring L-amino acids
  misc_feature (130): Xaa equals any of the naturally occurring L-amino acids
  misc_feature (159): Xaa equals any of the naturally occurring L-amino acids
  misc_feature (160): Xaa equals any of the naturally occurring L-amino acids
  misc_feature (162): Xaa equals any of the naturally occurring L-amino acids
  misc_feature (178): Xaa equals any of the naturally occurring L-amino acids
IIERISSWKKSLSVIFAGSLFALFQNSIGNTTQSVQLKEKRGVVLLYILLGTIGTLVAVLAASALLYRHWIEIVLLYRTYQSKDQTLGDKKDFDAFVSYAKWSSFPSEATSSLSEEHLAXSLFPDVLENXYGYSLCLLERDVAPGGVYAEDIVSIIKRXXRXIFILSPNYVNGPSIFXTTSSSESCLG

SEQ ID NO: 291 - protein, 144 aa, Homo sapiens
  misc_feature (116): Xaa equals any of the naturally occurring L-amino acids
  misc_feature (134): Xaa equals any of the naturally occurring L-amino acids
  misc_feature (141): Xaa equals any of the naturally occurring L-amino acids
  misc_feature (143): Xaa equals any of the naturally occurring L-amino acids
RKERHDQQFHSLKPISGFITGDQARNFFFQSGLPQPVLAQIWALADMNNDGRMDQVEFSIAMKLIKLKLQGYQLPSALPPVMKQQPVAISSAPALVWGGIASKPPLTAVAPVPMGXIPVVGNVSNPSIFCSHSXVPPLAKXGXP

SEQ ID NO: 292 - protein, 175 aa, Homo sapiens
  misc_feature (5): Xaa equals any of the naturally occurring L-amino acids
  misc_feature (21): Xaa equals any of the naturally occurring L-amino acids
  misc_feature (143): Xaa equals any of the naturally occurring L-amino acids
WLGCXGSVVVVAMFFSEARAXSRTWEASPSEHRKWVEVFKACDEDHKGYLSREDFKTAVVMLFGYKPSKIEVDSVMSSINPNTSGILLEGFLNIVRKKKEAQRYRNEVRHIFTAFDTYYRGFLTLEDFKKAFRQVAPKLPERXVLEVFREVDRDSDGHVSFRDFEYALNYGQKEA

SEQ ID NO: 293 - protein, 155 aa, Homo sapiens
  misc_feature (71): Xaa equals any of the naturally occurring L-amino acids
  misc_feature (110): Xaa equals any of the naturally occurring L-amino acids
  misc_feature (111): Xaa equals any of the naturally occurring L-amino acids
  misc_feature (113): Xaa equals any of the naturally occurring L-amino acids
  misc_feature (116): Xaa equals any of the naturally occurring L-amino acids
  misc_feature (125): Xaa equals any of the naturally occurring L-amino acids
VPGRNQLVIPTFRPVSCSSPACFCVLAPCLISRPPPRERVKAMFYHAYDSYLENAFPFDELRPLTCDGHDXWGSFSLTLIDALGHLLILGNVSEFQRVVEVLQDSVDFDXXVXASXFETNIRVVXGLLSAHLLSKKAGVEVEAGWPCSGPAPENG

SEQ ID NO: 294 - protein, 156 aa, Homo sapiens
  misc_feature (139): Xaa equals any of the naturally occurring L-amino acids
  misc_feature (144): Xaa equals any of the naturally occurring L-amino acids
  misc_feature (146): Xaa equals any of the naturally occurring L-amino acids
  misc_feature (150): Xaa equals any of the naturally occurring L-amino acids
LTRIFKISDQDNDGTLNDAELNFFQRICFNTPLAPQALEDVKNVVRKHISDGVADSGLTLKGFLFLHTLFIQRGRHETTWTVLRRFGYDDDLDLTPEYLFPLLKIPPDCTTELNHHAYLFLKAPLTSMIWIETVLCHLXSLKIXLXFSLXYLGGQM

SEQ ID NO: 295 - protein, 207 aa, Homo sapiens
  misc_feature (177): Xaa equals any of the naturally occurring L-amino acids
TTDEDDSEYEDCPEEEEDDWQTCSEEDGPKEEDCSQDWKESSTADSEARSRKTPQKRQIHNFSHLVSKQELLELFKELHTGRKVKDGQLTVGLVGYPNVGKSSTINTIMGNKKVSVSATPGHTKHFQTLYVEPGLCLCDCPGLVMPSFVSTKAEMTCSGILPIDQMRDHVPPVSLIXFLLWKHSSYYVHIRASGLFWAFEGFRFDEE

SEQ ID NO: 296 - protein, 309 aa, Homo sapiens
  misc_feature (254): Xaa equals any of the naturally occurring L-amino acids
  misc_feature (292): Xaa equals any of the naturally occurring L-amino acids
IINVTKSDAGSYTCIATNHFGTASSTGNLVVKDPTRVMVPPSSMDVTVGESIVLPCQVTHDHSLDIVFTWSFNGHLIDFDRDGDHFERVGGQDSAGDLMIRNIQLKHAGKYVCMVQTSVDRLSAAADLIVRGPPGPPEAVTIDEITDTTAQLSWRPGPDNHSPITMYVIQARTPFSVGWQAVSTVPELIDGKTFTATVVGLNPWVEYEFRTVAANVIGIGEPSRPSEKRRTEEALPEVTPANVSGGGGSKSELXITWETVPEELQNGRGFGYVVAFRPYGKMIWMLTVLASXDASRYVFRNESVHPSLL

SEQ ID NO: 297 - protein, 275 aa, Homo sapiens
  misc_feature (22): Xaa equals any of the naturally occurring L-amino acids
  misc_feature (47): Xaa equals any of the naturally occurring L-amino acids
  misc_feature (101): Xaa equals any of the naturally occurring L-amino acids
RWATYGRTGGLPNVGKSSTINXIMGNKKVSVSATPGHTKHFQTLYVXPGLCLCDCPGLVMPSFVSTKAEMTCSGILPIDQMRDHVPPVSLVCQNIPRHVLXATYGINIITPREDEDPHRPPTSEELLTAYGYMRGFMTAHGQPDQPRSARYILKDYVSGKLLYCHPPPGRDPVTFQHQHQRLLENKMNSDEIKMQLGRNKKAKQIENIVDKTFFHQENVRALTKGVQAVMGYKPGSGVVTASTASSENGAGKPWKKHGNRNKKEKSRRLYKHLDM

SEQ ID NO: 298 - protein, 501 aa, Homo sapiens
  misc_feature (179): Xaa equals any of the naturally occurring L-amino acids
GTSGGGAGAMAVLLETTLGDVVIDLYTEERPRACLNFLKLCKIKYYNYCLIHNVQRDFIIQTGDPTGTGRGGESIFGQLYGDQASFFEAEKVPRIKHKKKGTVSMVNNGSDQHGSQFLITTGENLDYLDGVHTVFGEVTEGMDIIKKINETFVDKDFVPYQDIRINHTVILDDPFDDPXDLLIPDRSPEPTREQLDSGRIGADEEIDDFKGRSAEEVEEIKAEKEAKTQAILLEMVGDLPDADIKPPENVLFVCKLNPVTTDEDLEIIFSRFGPIRSCEVIRDWKTGESLCYAFIEFEKEEDCEKAFFKMDNVLIDDRRIHVDFSQSVAKVKWKGKGGKYTKSDFKEYEKEQDKPPNLVLKDKVKPKQDTKYDLILDEQAEDSKSSHSHTSKKHKKKTHHCSEEKEDEDYMPIKNTNQDIYREMGFGHYEEEESCWEKQKSEKRDRTQNRSRSRSRERDGHYSNSHKSKYQTDLYERERSKKRDRSRSPKKSKDKEKSKYR

SEQ ID NO: 299 - protein, 254 aa, Homo sapiens
  misc_feature (4): Xaa equals any of the naturally occurring L-amino acids
  misc_feature (231): Xaa equals any of the naturally occurring L-amino acids
  misc_feature (233): Xaa equals any of the naturally occurring L-amino acids
  misc_feature (234): Xaa equals any of the naturally occurring L-amino acids
  misc_feature (241): Xaa equals any of the naturally occurring L-amino acids
  misc_feature (245): Xaa equals any of the naturally occurring L-amino acids
  misc_feature (246): Xaa equals any of the naturally occurring L-amino acids
  misc_feature (247): Xaa equals any of the naturally occurring L-amino acids
  misc_feature (254): Xaa equals any of the naturally occurring L-amino acids
PRGXKKMQSSLKLVDCIIEVHDARIPLSGRNPLFQETLGLKPHLLVLNKMDLADLTEQQKIMQHLEGEGLKNVIFTNCVKDENVKQIIPMVTELIGRSHRYHRKENLEYCIMVIGVPNVGKSSLINSLRRQHLRKGKATRVGGEPGITRAVMSKIQVSERPLMFLLDTPGVLAPRIESVETGLKLALCGTVLDHLVGEETMADYLLYTLNKHQRFGYVQHYGLGSACDNVXRXXKKCGCEXGEDXXXEGAHGHX

SEQ ID NO: 300 - protein, 173 aa, Homo sapiens
  misc_feature (162): Xaa equals any of the naturally occurring L-amino acids
ERMLHVVDGKVPDTLRKCFSEGEKVNYEKFRNWLFLNKDAFTFSRWLLSGGVYVTLTDDSDTPTFYQTLAGVTHLEESDIIDLEKRYWLLKAQSRTGRFDLETFGPLVSPPIRPSLSEGLFNAFDENRDNHIDFKEISCGLSACCRGPLAERQKFCFKVFDXDRDGSSLQGLN

SEQ ID NO: 301 - protein, 99 aa, Homo sapiens
  misc_feature (65): Xaa equals any of the naturally occurring L-amino acids
  misc_feature (85): Xaa equals any of the naturally occurring L-amino acids
GTEMAIQHPDIQPAVNHSVQVAIAGAGPVGLMMANYLGQMGIDVLVVEKLDKLIDYPRAIGIDDXALRTMQSVGLVDDVLPTLRXGTRCVFSPERPLFC

SEQ ID NO: 302 - protein, 138 aa, Homo sapiens
FIILDTDEYVLKYMESNAAQYSPEALASIQNHVRKREAPAPEAESKQTEKDPGVQELEALIDTIQKQLKDHSCKDNIREAFQIYDKEASGYVDRDMFFKICESLNVPVDDSLVKELIRMCSHGEGKINYYNFVRAFSN

SEQ ID NO: 303 - protein, 309 aa, Homo sapiens
  misc_feature (192): Xaa equals any of the naturally occurring L-amino acids
  misc_feature (288): Xaa equals any of the naturally occurring L-amino acids
  misc_feature (298): Xaa equals any of the naturally occurring L-amino acids
  misc_feature (304): Xaa equals any of the naturally occurring L-amino acids
  misc_feature (309): Xaa equals any of the naturally occurring L-amino acids
VTTLDSSKVLRFYAIWDDTDSMYGECRTYIIHYYLMDDTVEIREVHERNDGRDPFPLLMNRQRVPKVLVENAKNFPQCVLEISDQEVLEWYTAKDFIVGKSLTILGRTFFIYDCDPFTRRYYKEKFGITDLPRIDVSKREPPPVKQELPPYNGFGLVEDSAQNCFALIPKAPKKDVIKMLVNDNKVLRYLAXLESPIPEDKDRRFVFSYFLATDTISIFEPPVRNSGYHWGQVPWAGLKLLNHTLQWDNPVLLWAPVTSFIGCLLIEVFWVTRFINPGLQTSMVLEIXGEPRCPSISXGRHSGXISGTX

SEQ ID NO: 304 - protein, 117 aa, Homo sapiens
RDQGKALFLPHLSCTHFLPSTPHSKQTEKDPGVQELEALIDTIQKQLKDHSCKDNIREAFQIYDKEASGYVDRDMFFKICESLNVPVDDSLVKELIRMCSHGEGKINYYNFVRAFSN

SEQ ID NO: 305 - protein, 163 aa, Homo sapiens
  misc_feature (75): Xaa equals any of the naturally occurring L-amino acids
GPVGSSSEAPRGAGDAGMAGELTPEEEAQYKKAFSAVDTDGNGTINAQELGAALKATGKNLSEAQLRKLISEVDXDGDGEISFQEFLTAAKKARAGLEDLQVAFRAFDQDGDGHITVDELRRAMAGLGQPLPQEELDAMIREADVDQDGRVNYEEFARMLAQE

SEQ ID NO: 306 - protein, 341 aa, Homo sapiens; identical to SEQ ID NO: 228
  misc_feature (306): Xaa equals any of the naturally occurring L-amino acids
  misc_feature (338): Xaa equals any of the naturally occurring L-amino acids

SEQ ID NO: 307 - protein, 113 aa, Homo sapiens
  misc_feature (62): Xaa equals any of the naturally occurring L-amino acids
  misc_feature (77): Xaa equals any of the naturally occurring L-amino acids
  misc_feature (80): Xaa equals any of the naturally occurring L-amino acids
  misc_feature (90): Xaa equals any of the naturally occurring L-amino acids
  misc_feature (112): Xaa equals any of the naturally occurring L-amino acids
RVKAKKNAAPFRSEVCFGKEGLWKLLGGFQETCSKAIRVGVIGFPNVGKSSIINSLKQEQMXNVGVSMGLTRSMQVXPLXKQITIIDSPXLHRIFHLIPPLRFALRSPAKYXK

SEQ ID NO: 308 - protein, 293 aa, Homo sapiens
SAGTSEAGRSGAEEVSCGSVSGDGAAMRLTPRALCSAAQAAWRENFPLCGRDVARWFPGHMAKGLKKMQSSLKLVDCIIEVHDARIPLSGRNPLFQETLGLKPHLLVLNKMDLADLTEQQKIMQHLEGEGLKNVIFTNCVKDENVKQIIPMVTELIGRSHRYHRKENLEYCIMVIGVPNVGKSSLINSLRRQHLRKGKATRVGGEPGITRAVMSKIQVESSGARPSTLSRALQASGTCRPLCGFRLLTTLPSPPLSVPAEHPRGRHCPCPYSTVVIVFAPNLWGRHAVFPISR

SEQ ID NO: 309 - protein, 292 aa, Homo sapiens
QASGTTLRPLPDLPQLKRREATSRNRALKPRGRLVLMTSCLPALRFIATPRLSAMPHIDNDVKLDFKDVLLRPKRSTLKSRSEVDLTRSFSFRNSKQTYSGVPIIAANMDTVGTFEMAKVLCKFSLFTAVHKHYSLVQWQEFAGQNPDCLEHLAASSGTGSSDFEQLEQILEAIPQVKYICLDVANGYSEHFVEFVKDVRKRFPQHTIMAGNVVTGEMVEELILSGADIIKVGIGPGSVCTTRKKTGVGYPQLSAVMECADAAHGLKGTSFQMEVAAVLGMWPRLLGQELTS

SEQ ID NO: 310 - protein, 110 aa, Homo sapiens
  misc_feature (85): Xaa equals any of the naturally occurring L-amino acids
  misc_feature (94): Xaa equals any of the naturally occurring L-amino acids
RSSSQDELVAVAAAAAGALRGHELYAFPAAHPARPPVRAAASAPWCARSRRLRARSRPLQGASQGHVYHAYDSYLENAFPFDELXLLTCDGHDXWGSFSLTLIDALDNLL

SEQ ID NO: 311 - protein, 349 aa, Homo sapiens
  misc_feature (248): Xaa equals any of the naturally occurring L-amino acids
  misc_feature (268): Xaa equals any of the naturally occurring L-amino acids
  misc_feature (269): Xaa equals any of the naturally occurring L-amino acids
  misc_feature (274): Xaa equals any of the naturally occurring L-amino acids
  misc_feature (283): Xaa equals any of the naturally occurring L-amino acids
  misc_feature (285): Xaa equals any of the naturally occurring L-amino acids
  misc_feature (293): Xaa equals any of the naturally occurring L-amino acids
  misc_feature (297): Xaa equals any of the naturally occurring L-amino acids
  misc_feature (314): Xaa equals any of the naturally occurring L-amino acids
SSLPATCQSLLSAAHPCAAVPAQSHLAPWDLSLLFLLSLSAGVLMVCIVIGARKLGVNPDNIATPIAASLGDLITLSILALVSSFFYRHKDSRYLTPLVCLSFAALTPVWVLIAKQSPPIVKILKFGWFPIILAMVISSFGGLILSKTVSKQQYKGMAIFTPVHMWCWWQSGGHSDQPNLNLPAHVECTWRPAPPDEEILAQPVFYFLHVRNQFHVSSSPALAGGPRPSDFLLHHLPGGGSVSHKQPXLCGALPAGRPDPGDNPAVPXXSDGSXDLAPGPGSXQXLHPLPYRXGGPXRFKLRGPHCCCAKKVYXLPRMGLIQPFICTQHLIVSLLSFYFPFCLLAKTSI

SEQ ID NO: 312 - protein, 51 aa, Homo sapiens
LQEFGTSSHTLEERVVHWYFKLLDKNSSGDIGKKEIKPFKSSFAINQSPKN

SEQ ID NO: 313 - protein, 125 aa, Homo sapiens; identical to SEQ ID NO: 239

SEQ ID NO: 314 - protein, 78 aa, Homo sapiens [sequence omitted]

SEQ ID NO: 315 - protein, 173 aa, Homo sapiens
  misc_feature (137): Xaa equals any of the naturally occurring L-amino acids
  misc_feature (168): Xaa equals any of the naturally occurring L-amino acids
LEEYQALTFLTRNEILCIHDTFLKLCPPGKYYKEATLTMDQVSSLPALRVNPFRDRICRVFSHKGMFSFEDVLGMASVFSEQACPSLKIEYAFRIYDFNENGFIDEEDLQRIILRLLNSDDMSEDLLMDLTNHVLSXSDLDNDNMLSFSEFEHAMAKSPDFMTPFGFXSGDLM

SEQ ID NO: 316 - protein, 101 aa, Homo sapiens
GRDDPGASPQSSSQPDHGRLSPPEAPDRPTISTASETSVYVTWIPRGNGGFPIQSFRVEYKKLKKVGDWILATSAIPPSRLSVEITGLRERHLLQVSSSGF

SEQ ID NO: 317 - protein, 189 aa, Homo sapiens; identical to SEQ ID NO: 242

SEQ ID NO: 318 - protein, 262 aa, Homo sapiens
  misc_feature (203): Xaa equals any of the naturally occurring L-amino acids
  misc_feature (211): Xaa equals any of the naturally occurring L-amino acids
CGQQADVSPPIPHLRALLSSSDDPPAEVDIFELLKVSYEKFSSLRAEDIEQMRFKQRLKVIQSLEDTAKRSVVRAIPVDIGFSIEELEDLYMVFKAKHLASQYWGCSRTMAGRRDPSLPYLEQYRIDASQFRELFASLTPWACGSHTPLLAGRMFRLLDENKDSLINFKEFVTGMSGMYHGDLTEKLKVLYKLHLPPALSPEXSRVSPGGXPLFHRGQLLQKKHLPQEEQEGSGSEERGEEKGTSSPDYRHYLRLWAQGERG

SEQ ID NO: 319 - protein, 161 aa, Homo sapiens
WWVNHTEVTIPYLATDVTCVGPGAHKGQSVISLDLYTCELDLTNLILFSLSISVSLFLMVMMTASHLYFWDVWYIYHFCKAKIKGYQRLISPDCCYDAFIVYDTKDPAVTEWVLAELVAKLEDPREKHFNLCLEERDWLPGQPVLENLSQSIQLSKKTVFV

SEQ ID NO: 320 - protein, 207 aa, Homo sapiens
  misc_feature (194): Xaa equals any of the naturally occurring L-amino acids
WLLRPFRLQLGHGVAHSHAAVIPDGDSIRRETGFSQASLLRLHHRFRALDRNKKGYLSRMDLQQIGALAVNPLGDRIIESFFPDGSQRVDFPGFVRVLAHFRPVEDEDTETQDPKKPEPLNSRRNKLHYAFQLYDLDRDGKISRHEMLQVLRLMVGVQVTEEQLENIADRTVQEADEDGDGAVSFVEFTKSLEXMDVEQKMSIRILK

SEQ ID NO: 321 - protein, 119 aa, Homo sapiens
  misc_feature (10): Xaa equals any of the naturally occurring L-amino acids
  misc_feature (112): Xaa equals any of the naturally occurring L-amino acids
  misc_feature (116): Xaa equals any of the naturally occurring L-amino acids
LRAGSLKYSXLQAEGNFDPSCCFTIYHGNHMESLDLITSNPEEARTWITGLKYLMAGISDEDSLAKRQRTHDQWVKQTFEEADKNGDGLLNIEEIHQLMHKLNVNLPRRKVXQMFXEAD

SEQ ID NO: 322 - protein, 195 aa, Homo sapiens
  misc_feature (171): Xaa equals any of the naturally occurring L-amino acids
  misc_feature (179): Xaa equals any of the naturally occurring L-amino acids
  misc_feature (192): Xaa equals any of the naturally occurring L-amino acids
WSKPEGCSPEEVITYTLEIQEDENDNLFHPKYTGEDLTCTVKNLKRSTQYKFRLTASNTEGKSCPSEVLVCTTSPDRPGPPTRPLVKGPVTSHGFSVKWDPPKDNGGSEILKYLLEITDGNSEANQWEVAYSGSATEYTFTHLKPGTLYKLRACCISTGGHSQCSESLPVXTLSIAPGXCRPPRVWVDQSTXKST

SEQ ID NO: 323 - protein, 250 aa, Homo sapiens
  misc_feature (240): Xaa equals any of the naturally occurring L-amino acids
ADAWAAASRVGSNRSRARAGGGAMACAGLLTVCLLRPPAPQPQPQTPRHPQLAPDPGPAGHTLFQDVFRRADKNDDGKLSFEEFQNYFADGVLSLGELQELFSGIDGHLTDNLETEKLCDYFSEHLGVYRPVLAALESLNRAVLAAMDATKLEYERASKVDQFVTRFLLRETVSQLQALQSSLEGASDTLEAQAHGWRSDAESVEAQSRLCGSRRAGRRALRSVSRSSTWSPGSSDTGRXQRPRCSGGSR

SEQ ID NO: 324 - protein, 449 aa, Homo sapiens
GLSEPHTPRSSCHSRRLRGGSPAPRLSLGAASPRPRPPSLPLPLPLPFPLFLPTRPAERAWIRSRRASEWVGKMEVPRLDHALNSPTSPCEEVIKNLSLEAIQLCDRDGNKSQDSGIAEMEELPVPHNIKISNITCDSFKISWEMDSKSKDRITHYFIDLNKKENKNSNKFKHKDVPTKLVAKAVPLPMTVRGHWFLSPRTEYTVAVQTASKQVDGDYVVSEWSEIIEFCTADYSKVHLTQLLEKAEVIAGRMLKFSVFYRNQHKEYFDYVREHHGNAMQPSVKDNSGSHGSPISGKLEGIFFSCSTEFNTGKPPQDSPYGRYRFEIAAEKLFNPNTNLYFGDFYCMYTAYHYVILVIAPVGSPGDEFCKQRLPQLNSKDNKFLTCTEEDGVLVYHHAQDVILEVIYTDPVDLSLGTVAEITGHQLMSLSTANAKKDPSCKTCNISVGR

SEQ ID NO: 325 - protein, 439 aa, Homo sapiens
  misc_feature (166): Xaa equals any of the naturally occurring L-amino acids
  misc_feature (260): Xaa equals any of the naturally occurring L-amino acids
  misc_feature (305): Xaa equals any of the naturally occurring L-amino acids
  misc_feature (360): Xaa equals any of the naturally occurring L-amino acids
FSLEALQTIHKQMDDDKDGGIEVEESDEFIREDMKYKDATNKHSHLHREDKHITIEDLWKRWKTSEVHNWTLEDTLQWLIEFVELPQYEKNFRDNNVKGTTLPRIAVHEPSFMISQLKISDRSHRQKLQLKALDVVLFGPLTRPPHNWMKDFILTVSIVIGVGGCXFAYTQNKTSKEHVAKMMKDLESLQTAEQSLMDLQERLEKAQEENRNVAVEKQNLERKMMDEINYAKEEACRLRELREGAECELSRRQYAEQELXQVRMALKKAEKEFELRSSWSVPDALQKWLQLTHEVEVQYYNIKRXNAEMQLAIAKDEAEKIKKKRSTVFGTLHVAHSSSLDEVDHKILEAKKALSELTTXLRERLFRWQQIEKICGFQIAHNSGLPSLTSSLYSDHSWVVMPRVSIPPYPIAGGVDDLDEDTPPIVSQFPGKWLNLLDH

SEQ ID NO: 326 - protein, 320 aa, Homo sapiens
  misc_feature (137): Xaa equals any of the naturally occurring L-amino acids
  misc_feature (138): Xaa equals any of the naturally occurring L-amino acids
  misc_feature (146): Xaa equals any of the naturally occurring L-amino acids
  misc_feature (148): Xaa equals any of the naturally occurring L-amino acids
  misc_feature (149): Xaa equals any of the naturally occurring L-amino acids
  misc_feature (151): Xaa equals any of the naturally occurring L-amino acids
  misc_feature (172): Xaa equals any of the naturally occurring L-amino acids
  misc_feature (175): Xaa equals any of the naturally occurring L-amino acids
  misc_feature (252): Xaa equals any of the naturally occurring L-amino acids
  misc_feature (254): Xaa equals any of the naturally occurring L-amino acids
AVRLLPAFENTKTGIPYPRVNLKTGVPPDTNNETCTAGAGSLLVEFGILSRLLGDSTFEWVARRAVKALWNLRSNDTGLLGNVVNIQTGHWVGKQSGLGAGLDSFYEYLLKSYILFGEKEDLEMFNAAYQSIQNYLXXGREACNEXEXXPXLYVNVNMFSGQLMNTWIDSLXAFXPGLQVLIGDVEDAICLHAFYYAIWKRYGALPERYNWQLQAPDVLFYPLRPELVESTYLLYQATKNPFYLHVGMDILXSXEKYTKVKCGYATLHHVIDKSTEDRMESFFLSETCKYLYLLFDEDNPVHKSWNQIHVHNRGTHCICG

SEQ ID NO: 327 - protein, 420 aa, Homo sapiens
TQIRLNPVYKAVVSSDKSGMIEYWTGPPHEYKFPKNVNWEYKTDTDLYEFAKCKAYPTSVCFSPDGKKIATIGSDRKVRIFRFVTGKLMRVFDESLSMFTELQQMRQQLPDMEFGRRMAVERELEKVDAVRLINIVFDETGHFVLYGTMLGIKVINVETNRCVRILGKQENIRVMQLALFQGIAKKHRAATTIEMKASENPVLQNIQADPTIVCTSFKKNRFYMFTKREPEDTKSADSDRDVFNEKPSKEEVMAATQAEGPKRVSDSAIIHTSMGDIHTKLFPVECPKTVENFCVHSRNGYYNGHTFHRIIKGFMIQTGDPTGTGMGGESIWGGEFEDEFHSTLRHDRPYTLSMANAGSNTNGSQFFITVVPTPWLDNKHTVFGRVTKGMEVVQRISNVKVNPKTDKPYEDVSIINITVK

SEQ ID NO: 328 - protein, 92 aa, Homo sapiens
  misc_feature (3): Xaa equals any of the naturally occurring L-amino acids
  misc_feature (4): Xaa equals any of the naturally occurring L-amino acids
ARXXYVFQVQAMNSAGLGQPSMPTDPVLLEDKPGAHEIEVGVDEEGFIYLAFEAPEAPDSSEFQWSKDYKGPLDPQRVKIEDKVNKSKVILK

SEQ ID NO: 329 - protein, 173 aa, Homo sapiens
  misc_feature (154): Xaa equals any of the naturally occurring L-amino acids
MPQPGPPYDVRASEVRATSLVLQWEPPLYMGAGPVTGYHVSFQEEGSEQWKPVTPGPISGTHLRVSDLQPGKSYVFQVQAMNSAGLGQPSMPTDPVLLEDKPGAHEIEVGVDEEGFIYLAFEAPEAPDSSEFQWSKDYKGPLDPQRVKIEDKVXKSKVILKEPASRIWAPTQS

SEQ ID NO: 330 - protein, 407 aa, Homo sapiens
  misc_feature (32): Xaa equals any of the naturally occurring L-amino acids
QGQEATGKVLIKIHKDTSQVPTALGDASIAAXVLWTLPGAQRRGEFAPKGAPMTNICPPEERTGTRVKANLSEVLVSSVLGVNVTSTEVYGAFTCSIQNISFSSFTLQRAGPTSHVAAVLASLLVLLALLLAALLYVKCRLNVLLWYQDAYGEVEINDGKLYDAYVSYSDCPEDRKFVNFILKPQLERRRGYKLFLDDRDLLPRAEPSADLLVNLSRCRRLIVVLSDAFLSRAWCSHSFREGLCRLLELTRRPIFITFEGQRRDPAHPALRLLRQHRHLVTLLLWRPGSVTPSSDFWKEVQLALPRKVRYRPVEGDPQTQLQDDKDPMLILRGRVPEGRALDSEVDPDPEGDLGVRGPVFGEPSAPPHTSGVSLGESRSSEVDVSDLGSRNYSARTDFYCLVSKDDM

SEQ ID NO: 331 - protein, 684 aa, Homo sapiens
RRAEHSMAVKVQTTKRGDPHELRNIFLQYASTEVDGERYMTPEDFVQRYLGLYNDPNSNPKIVQLLAGVADQTKDGLISYQEFLAFESVLCAPDSMFIVAFQLFDKSGNGEVTFENVKEIFGQTIIHHHIPFNWDCEFIRLHFGHNRKKHLNYTEFTQFLQELQLEHARQAFALKDKSKSGMISGLDFSDIMVTIRSHMLTPFVEENLVSAAGGSISHQVSFSYFNAFNSLLNNMELVRKIYSTLAGTRKDVEVTKEEFAQSAIRYGQVTPLEIDILYQLADLYNASGRLTLADIERIAPLAEGALPYNLAELQRQQSPGLGRPIWLQIAESAYRFTLGSVAGAVGATAVYPIDLVKTRMQNQRGSGSVVGELMYKNSFDCFKKVLRYEGFFGLYRGLIPQLIGVAPEKAIKLTVNDFVRDKFTRRDGSVPLPAEVLAGGCAGGSQVIFTNPLEIVKIRLQVAGEITTGPRVSALNVLRDLGIFGLYKGAKACFLRDIPFSAIYFPVYAHCKLLLADENGHVGGLNLLAAGAMAGVPAASLVTPADVIKTRLQVAARAGQTTYSGVIDCFRKILREEGPSAFWKGTAARVFRSSPQFGVTLVTYELLQRWFYIDFGGLKPAGSEPTPKSRIADLPPANPDHIGGYRLATATFAGIENKFGLYLPKFKSPSVAVVQPKAAVAATQ

SEQ ID NO: 332 - protein, 199 aa, Homo sapiens
HERGPCHTYKVQRLNESTSYKFCIQACNEAGEGPLSQEYIFTTPKSVPAALKAPKIEKVNDHICEITWECLQPMKGDPVIYSLQVMLGKDSEFKQIYKGPDSSFRYSSLQLNCEYRFRVCAIRQCQDSLGHQDLVGPYSTTVLFISQRTEPPASTNRDTVESTRTRRALSDEQCAAVILVLFAFFSILIAFIIQYFVIK

SEQ ID NO: 333 - protein, 155 aa, Homo sapiens
  misc_feature (124): Xaa equals any of the naturally occurring L-amino acids
  misc_feature (128): Xaa equals any of the naturally occurring L-amino acids
  misc_feature (135): Xaa equals any of the naturally occurring L-amino acids
EGGDVGAMGLGPVFLLLAGIFPFAPPGAAAEPHSLRYNLTVLSWDGSVQSGFLAEVHLDGQPFLRYDRQKCRAKPQGQWAEDVLGNKTWDRETRDLTGNGKDLRMTLAHIKDQKEGLHSLQEIXVCEXHEDNSNXELPKHFYYDWELFLSQNVET

SEQ ID NO: 334 - protein, 288 aa, Homo sapiens
  misc_feature (20): Xaa equals any of the naturally occurring L-amino acids
  misc_feature (40): Xaa equals any of the naturally occurring L-amino acids
  misc_feature (232): Xaa equals any of the naturally occurring L-amino acids
GFWGTIAALVEVRTHIRVGXVGLPNVGKSSLINSLKRSRXCSVGAVPGITKFMQEVYLDKFIRLLDAPGIVPGPNSEVGTILRNCVHVQKLADPVTPVETILQRCNLEEISNYYGVSGFQTTEHFLTAVAHRLGKKKKGGLYSQEQAAKAVLADWVSGKISFYIPPPATHTLPTHLSAEIVKEMTEVFDIEDTEQANEDTMECLATGESDELLGDTDPLEMEIKLLHSPMTXIADAIENKTTVYKIGDLTGYCTNPNRHQMGWAKRNVDHRPKSNSMVDVCSVDRRSV

SEQ ID NO: 335 - protein, 107 aa, Homo sapiens
MDGAQGRLLPVSSRHSNLALLKPTSRDLTAPPEGASLMTVGGITAPRDVQVWNPRTWESVTLRGKRDPAPVLQFRISWWGDDRGWLRWALSNHGGPYKGRGVTRVCA

SEQ ID NO: 336 - protein, 86 aa, Homo sapiens
  misc_feature (62): Xaa equals any of the naturally occurring L-amino acids
NPLVKRTGVAGESGITRLVTRRAICPCAIILLVVGNILNIVLDVWLVMGLHMNVQGAALATXIAEYATLLIGLLMVRKILKLRGIS

SEQ ID NO: 337 - protein, 178 aa, Homo sapiens
  misc_feature (37): Xaa equals any of the naturally occurring L-amino acids
  misc_feature (39): Xaa equals any of the naturally occurring L-amino acids
  misc_feature (151): Xaa equals any of the naturally occurring L-amino acids
  misc_feature (168): Xaa equals any of the naturally occurring L-amino acids
  misc_feature (172): Xaa equals any of the naturally occurring L-amino acids
  misc_feature (175): Xaa equals any of the naturally occurring L-amino acids
EKQHGKPRAEEGEGPILSALIYCTSEGRALTRHAASXRXGMNIEVGNISYTGAIISWSSSEPCLEDYYHIMYRPNWNSIFSGYLRYSFHHEEKVPRTISSVVLEHLAPSTLYFLCISCKKAAFPYRHYCTMFHTLDKSPLAPGSSLGRPPXLSLGADGHSAGPASQAXWASXCFXILG

SEQ ID NO: 338 - protein, 55 aa, Homo sapiens
AHLSARLSALILDEVAILPAPQNLSVLSTNMKHLLMWSPVIAPGETVYYSVEYQG

SEQ ID NO: 339 - DNA, 12477 bp, Homo sapiens
agtgatggaggagagaagatggcggaagcggagtgagtgactagatggtgactgatgtcgtaactagggggggcgagttggggcagcgacacgttcccccaggggaaagctcagggctcttttgcgggcagtgtggggaaagagagactcgagacccgtcctatcgtggaggagccggctaggcccgtgtcgcggggcgaagacgaactctagggtccagttaccctccaggcaggagcgccccttccgccatcaggtcccggatctgcgcggccctgcgcgcagggtcacccttgggactccgggagctggggttttccggggaacgagcccgggtgggctcctcaggcgctgtcattcctgcaagtgggccccgcgggcagccttgttacggctgcctgcgcaggggcccgcggaggctgggtagggcagggcgggcactgccaggcctccttcgccttcttctccttcccgccccggcgccaccccactcctcctcagcgggagaatccgacacgcggggctgcccgcttccctcgtgccggaggcatcccggcgtgggcctgagagcggcgggggctgcttgcaggtctggtgaggctgaaaacaccctgaaagaaaggtctttccctcgattctctgggtgcagcgttgctgcctcacacgcgggccacattcttgtgtgtcggtgtgacggtatgtttagttaacgactccagaacttactgtttcctgggtaggcctcttgtgcaccagaactgctggctgtattttgcaggtattagtatgcctagacggtggagttaccaaagttgttcttttgtgccaggcctcgaaatgcagtgcgatggtttggccagttccgctcaaccgatgtttagacttatgccgagaatttggattctctgtgaccatttttggttaggagttagaactgtttaccatactgtttggattggagggcatagttgagcagattaacacttttaaaaaaccagaacttaagctggccttttgcatgtcactggtacacgatacggtagtagtatgacaggcagcagttcggtaaaaagtttaccttacctaccactaatactgtataatgttgaacagttaccatatgatgctgtgatttgattggaaggcagtttggaaaaaaaaaaaaaaaacagaagcataaaaatgtatgaattatttactaatccaaaaagtaagtgaggagtcagctttcttcctgacggttttcctttcacttttcctcttattttctttttctttctttgtgacagcgtctctcactcttatctcccaggctggagtgcagtggcacgatcatagctcactgcagcctggccctcttgggctcaagcgatttccccaccttagcctctcaagttgctgggaccacagtcctgtgccaccaggcctggctaattttttatttttcatttgtagagacagggtttccctatgttgcccaggctggctttgaacgcctaagctcaagcagtcctccccctgagtggtaggatgacaggtgtgaaccgccactcaaggcccccacttttcctttttttttttttttgttcggtttttttttacatttggttcctcagagaatataaatactgtttacatacgtaatatagaacaaagaaaatttgtacttaaaaaagcaacgctatggtaatagtgtatgtgtaccaattagtgccagattcatttgttttttcatggaatagaaagtgttcttacatttttatcagtgctgctaatgtggggtgggtgggatttagtttctcagaagaaaagaccgataagaaaagggagataaaaccagtataatctcttgtgtgcttttcaccttcgaggtacatttctggcccgacaaaaactactgctcttctggtttctaacaatatggaggtccttagaattgacttaaagtgtttgaatttattcaaatacagattctgtatttagtggaattttgtaccacaacaagtaagattatagtattggagggaagaaagtctggtataaaagtgtactttactgtccatacatgaggaagtgacataatttatgttttcaaaatctggagtaattctttgtgaaaaagattttgtaagggtatgggaagttgctgtttgctgcttctctgtgttctcacagcaatctgctaataagtataactcagctattagaagtagtaaggacagcgttgtagactgattaggggaaaagccagtgtgagttaaaaaaattactttttaacattttttaaaaagaacttatttttaagcaaagtttatatggtaaactaaactaagctagttaacatgagtccctaggcattctgttctaatgtataggtaagaatgactttagtttgtaattagtgtggtcaaaagaatgtaaagaaatgttttaaaatactctgatactgcttaaatttttattttcctaggtagtttagtattctctcattacctgttttggtttaaaaaaaatctttcggtaatgcaaagataaacttttggctatgcgttatctgagttacgtattctgaatcatttgaattcaaatgtagtaggtattaactattaaatatgctccatatatgtgaagtatttttcccttctaagtgcttatagtgactgtgtgttggctgtcttttatgagagccttcctagcagtttagattactgctgattatttctttggaatgaatattctttaaagctcataagataatgcttttaccaatacaaacactttgtgtgacctgccagatttaaggaccatagtacagctatggatactgaaccaaacccgggaacatcttctgtgtcaacaacaaccagcagtaccaccaccaccaccatcaccacttcctcctctcgaatgcagcagccacagatctctgtctacagtggttcagaccgacatgctgtacaggtatttcagctgtagtgatgggtagtctaagacttaagatgtcatattactttttgcttaagctggatttatgtattgtttcatattctcaaatgtacagttagaattactaatgtttcaatcaactgtctcaatccattttgtgtggctatagcagaataccaagactgtgtaattgtaaagaaaagaaacttatttcttacatttctggaagctgggaagtctaatatgaaggagctggcatctcacgagggccgtcttattgcctcattccgtggtggaagactagagagcaagataccaaatttgcagcctcaagcccttttaaaatttcctttagtcggccgggcgcggtggctcacgcctgtaatcccagcactttgggaggccgaggcgggcggatcacgaggtcaggagatcgagaccacggtgaaaccccgtctctactaaaaatacaaaaaattagccgggcgcagtggcgggcgcctgtagtcccagctactcgggaggctgaggcaggagaatggcgtgaacccggaaggcggagcttgcagtgagcggagatcgcgccacagcactcccgcctgagcgacagaacgagactccgtctcaaaaaaaaaaaaaaaaaaaaattttcctttagtctattcatgtgggcggagtccttatggcctaatcacccttcaggggtcctacctcttaacactgttgcattggagattaagtttccaacacatacttaattgggggacacatttaaccacagcaacagccaacaaagttaattaataatcatactattggctaggcgtggtggctcacgcctgtaatcccaacactgtgggagaccaaggcagggagatagcttgagcttaggagttggagactggctgggacaacatgttgaaaccccatctctacaaaaaatacaaaaatcagcagggcatggtggcatgtgccagtggtcccagctactcaggaggctgaggtgggaggattgcttgagcccaggaggtcaaggctgcaatgagctgtgatcgcaccactgtactccagtctaggtgacagagtgagaccctgtctcaaaaaaaaaaaaaaaaaaaaaatgctgggcgtggtggctcacacttctaatcccagcgctttgggagaccaaggctggcggatcacttgaggtcaggtgtttgagaccagcctgatcaacatggtgaaaccccgtctctactaagaatacaaaaattagccaggcatggtaatgcatacctgtaatcccagctacttgggaggctgaggcaggagtatcacttgaaccctggcggcagaggttgcagtgagccaagatagcgccactgcactccagcctgggcaaaaagagtgagactccatctcaaaatatatatatatagtattgagagggcttacatttgtcagcatgtagtttataggattatgtgtaaagaaaattataaggggaaagtctctaggtgctgctacagtatgaaggcattcaacctagagccccaacatacagaatggttgtagctttattttatattggaactcaaaatatagacttagggagatctgttcaggtatgtagatatgttacgaagtttatattaaacccaggtggcctaagaaccctaagcaggaggatccattctaaataccttaggggcagagggggaagggaatattgaactaggaagtcacttagttgagaaagtaaagtttacttagttaacatttatgataatggaggttggggcaatatggtattatataaaaagggcatggaccttccactctattatactttgtttgaattccattttcattatctttaggagctatatagccttgggtatgagacataatccccttgagcctcagaaaactaaaatgagggtgagactacttctttcattaattactctgaggattaaatgaagtatctttgagattaatgaagtatctagaactgtgtaaggcacattataggtttccagtagatagtaatagctaatacttattgaataattgctacgtgccaaacatttgataaatgttacatgaattatctccattaatcattaccagccctctgtgaagtagctattattattatctccattttactgatgggaaaataaatgttttaaatcagctaaataactttcccaaactcacctagctagttctcagacttcagcccttgtgcccttaaccactctgtgaattcttattttttctattatacctgctttcttctggtagaatccttataattgcatccaccctgaaaacaactgcttgcaatatagtccttcctctgctccatttttccatggtggataccccagtataatgtctatttaactgtttttggtttaggatttagttttccaaaatcactgtggagtggaaccagccagttcaccagaaattcaaacttgaatgcagagtgaggttttaatgttttttacctttctctgaggtaagggatacagggaaaaggatttagatcttttttttttttttttttttgagaccgagtctcgctctatcgcccaggctggagtgcggtggcgtgatctaggctcactgcaacctctgcctcccaggttcaagcgattctcctgcttcagcctcctgagtagctgggactacaggcacgtgccaccacacccagctaattttttgtatttttagtagagatggggcttcaccatgttagccaggatggtctcaatctcttgagctggtaatccgcccgcctcggcctcccaaagtgctgggattataggcgtgagccactgcgcctggcccccccctttttttttttttcttctctccctctgtgttgcctaggctggagtccagtggcatgatcacaactcacgaccccctgggctcaagtgctcctcctgcttcagcctcctgagtagttgagactacaggcacatgtgactatgcttggctaatttttttattttgtagagacaggatctcactatgtcgcccaggctagtcttgaccttctggctttaagctctcctcctgccttagcctcccaaagtgctgggatgagccaccacgcctgactgataatgtgatcgcttaatataccattttgtcctctagttttcaattaagctgcatagattaataaaaaattaatagaaagatatgtagatgtagatatatctcataaatagcactgactctgtttcttatgagaccatagaattgcttctcccaaaatgaaatcaaatcaatatttattgaactacctaagtaattctttaatcttccagcttgctttttctgtcctgggaattctcttcaccctccttgggtgaataagaatttataataaataagaacaatttgctgtatctataacttgtatttactcattgctgtgagtaattgaatagtagtgaaagactgtgctgacaacagaaaaaatgagtatactctgacaaaagtatgtgtcaaatagattgttatttcagtttgattttagaatttttttccgtatacagtccagtgcttttagaattttgttatggaattagaagaacaaatagagattgatctgactaaaaaaggtatattgttataattctgaatcacttaatgctggcctatagtcccctgcaggtagaggtcaaaagctcccattgattttgtgacagaaatttgtatcaggcatagtagtctatagttggagaggtgagatattaacacatgaaaataaacaataacacacagaaatatgctgtcttgaagtttagataaaaggattcatggcattatggctcaagatgtcctgagagaccctcaagctataggattatggcactattactcccttagctctttgaaaactctggtttgatgctgcgattagggttctgtgctgtttcagagtcacagtgagcacaatgtgactttcggatttggttgtataggattgacttattctgacttaaccttttggagaaatgtaagaattttctctgattttagtagagtacttgacttttctatatttatttatgaagtttcaggctcagattttacattttactaacaaatattcacagtaattaacactttttaaggaattaagtaagaatagttttattcaatgttgaagcaaaacaaggtatttgacatttaaaaattttttaaattattgagtaattttctaaagaagaaatagctttataattttattttttatttttattttattattattatttttttgagatggggtcttgctctgtcgtctaggctggagtgcagtggcatgatctctggtcactgcagcctccacctcctgggttcaagcagttctcccacctgagcctcctgagtatctgggattacaggtgcatgccaccatgcctggccaagttttgtatttttagtagagacagggtttcactatgttggccaggctagtcttgaactcctgacctcaggtgacctgcctgccttggcctcccaaagtggtgggatcacaggcatgagccaacctgcccagctgctttgtaattttatatgattattaataatacctgctcattgtaagattttcagacatctatagaagagtatgaagtagaagctaaaaatcacctctaatctagctacccatcagtggtctttgaaagttttcctgtggattctttcaaatattttaatataaaaatggtatcttactctatatactattttgtaacccactgattttctttttgttagtaaatatagatcggtatcagcaatgtacactatagtggccagtagttacttgtggctgtttacattaaaattaaaattaattaaaattcaatttaaaattaactcaattctttagttgcactaaccacattttaagtgctcagtaggcacatgtgactagttgttactgtataggacagcactgatctacattactatttgttatggttgcatggtaaaggtattctctccacacccaagccctgaattctacgaagttttatccaaaaaggttatgccaacttgaatttttactagcaatatgggagtattggtttccccaggtagtagtagtattcttttaaatctttatccatctgaaagttggaaaacagtatcttgttctaatttgtaagtttttgactactggtgagattgaaaatcttttgaaatgcttagttggcctggcctgtcttttgcgaattgtccactgggttttgttttgttttttttttctttgagatgggagtcttgctgtgtcgcccaggctggagtgcagtggcatgatcttggctcaactgcagccttcacctcacaggttcaagcgattctcctgcctcagcctcccgagtagctggggctacaggcatgtgccaccatgcctggctaattttttgtgtttttagtagagacggggtttcaccatgttagccaggatggtcttgatctcctgaccttgtgatccgcccacctcggcctcccaaagtgctggaattaacaggcgtgagccaccgtgcccggcccactgggtagttttaatgtgtacaagttagtgatttctagtgatatgtaactaggaaagaaataatgttaataagcttgatgatattatgtattaaagcagtgaaattttaaactgccacttttttatactttgattttctgattaagataaaggttgagattatggtttgacattggttcaattgacttatcacaggtaattcaacaggcattgcatcggccccccagctcagctgctcagtaccttcagcaaatgtatgcagcccaacaacagcacttgatgctgcatactgcagctcttcagcagcagcatttaagcagctcccagcttcagagccttgctgctgttcaggtaagactaaaataagagtttatgagatcaaagtttctgttatctgtaggtagttactgaaaataaatagattgggtattatttcagagttctcagatgtcctgtggttatttttcccggaggaaatatattaataggttgccgaatagaagttaattgagaaaaaggggatatgtttttttatgttactctgtttctagcttttgtctcagtgctttttatccagattgaagaaatgctatgctagtttatgtgtataaagttctaggtacaacagtgagtacttaggcttacataaattgtatttttactaaaaataagattaaaaaaattatataagtaattatactcattaaaaaatcaaacaatattaagttgtttataagagataaagtaaagctgttccttttccctgtctatcactgtttcccgttcttcaaaggtggccacagtaacaatctaatacatatttctccagaaattttttatacaaagataggtatatccatttttctaaaatccaatcatattattcctactgataacaggatttcattattaaatgcttgtttttaaaaaagatttttgttactattgtactatttaaataaagctgtgtaagatttaatcttaaatcccctcaccagaggaggatctcaattgactgaacctgaaaaaggtttatttctgttaccaacagattctcagctgttgcttcttagtagtgtaatttttaaataacatgtttgtgatacaagttaggaaactgaaacccactcactggctcttgctgtagctctaatttctttttcataactctggagtagtgattccactttaaagatgacagagacccataaagtgaaactgacaataaagtagctaataaaataagattagtctttggatcccctgttttcaccattcagcttttccttatttaaaaaatctgtttaaccgaagcttaagccatgttgactataaaattagttgtttcatacataggccttttgacatttattgttgtggttttgtgttatcatggtaccagaaagttcttaacttcaggtttttaccgacatattctaaaagtcttactattttaggcaagtttgtccagtggaagaccatctacatctcccacaggaagtgtcacacagcagtcaagtatgtcccaaacgtctgtaagttccctaaatttttttttcctggatttaaaattttaaagaattgttttccaaaagtaaactgttgttatttatgaagctgttattataatttgttgcatgctgtttaaagtaacaattgcccagaaatagaaatgataaaattcaagaattcagaactaatgttaaacttatgaaaatctgagtcttaaaaaaatctttttgtattatttcttgtatatccatttgcactgatcatgttcagatcttatgtggtttcagctttctgtgtgtattgaaagcctaaaatatacaatgcagggatattggccatgaatttactgtgatatacaatagtatgtcatgtccttggtagacatctaagcatttctaactttgtgcaattcacattttagaaattatactttcagcttacatgagttatttgggttcaatttgcaagtatccattcaagatagggtaatttattttgagaaaggagtaaaagaaagctgattcgctatattgcacatatatattgggaaattgtgccaagtttcccaggtaaaataaatttatgggcatggtaatacttgtttagcttttaattttggtataattttaaactgcaataataataaaaaaatttctgtatctactctactcagattaatcaattattgcatattgccccattactttatcattcattcttttccactacatgtatacatatttttttctgagtcatttgtaagttgagatatgttcctttattcctaaatactttgatgtgtatttcctaagaacaaggctattgttttttgaagccacagaaaaattactaaattcaggaaatataacattgatacagtgcagttcattttcacatttcatcatttgtctcaggtttcccaacctcatcactatggacattatgagccagataattctttgttgtcaggggctatcgtgtaatttataggatgtttagcagcatccctggctactagatgccggcagcttgtggtctttctccttcctctagtgtgacaactataggtgtttcctggtggggggcaaactgcctgtagttgagaacctaataatgtcctttctagatattttttcctggtccagaatggtaatactttgatacttcataaaattggctccaatacaatatagtttgtaggttgttaaggaattgaaggttaaggaattgtgctctatttcttcagctaagggtatggtctttgctaactacatgctgtggtcagcatatagctgtggttttttttgttgtttggtttttttttctggctgttgatctgactttttttttttggcgtgggaatgtcctggagtgtgaacaagattagtttaaaaagttccctatgacttgaagatgttagattaaatgaaaaacttaaataatgtaacctagctcttaagcattaatactggagtttttgtcattgacatcagatgtctttaatacaatggtaattaaggaaaggagtggtaaatattttgtgggctactgaaggaaattatatagacaaattctttattctgtgaaatactggaataacaataggatgtatttgtatagatatgttattttgaatttttttccttcatgttattaaaaggtatctttttaaactgtctttcattatggctttatgtatgtgacattcacagaagttagaattctagtgattgtgcttatatatatgacattgttaatgttacttgtcataaaccagcagcattataccatgaagtatgccaaaagctgtaaatggctggtgggggaagataagtaagtaggaagaacagattcccagtaaaataaaggaataatacattacatttgctttatttactatccgttgtgagcttctgctcaagtaatttgactagcagtaaaaattacaatgcccaaggtaacttagtaaatttaggtcaatatccaaaaacgggggggagcatggtaacagatctcttaagtagtgatgataatgagccatcaggtaacagactagtagttttcagagttttgattattttgagttaggtttccagataacagtgaagccgtgggaaagggtccattctccagaagaaaaaacagctgtcaggtaaccagctaggtagttggggcttagagtaggagtgggatcccaatggggaaatggaatattattttaaaaatcaagtccaaagtccagtcataccacctgggggaactgtgtacctactgattgattattcctaatatgaaaacccgaaatgctctaaaatctgaaatttttgcacaccaacatgacattcaaaggaggagtgttcattggaacattttggattttggatttttagatttggcatgctaaaccagtttgtatctttccaaaatctgaaaaaaaaaaa

SEQ ID NO: 340 - DNA, 169 bp, Homo sapiens
ttttttttttttttgagacggagtctcgctctgtctcccaggctggagtgcagtggcgtgatctcggctcaccgcaagctccgcctcccgagttcacgccattctcctgcatcagcctcctgagtagctgggactacaggcgcccgccaccgcaccctgctaatttttt

SEQ ID NO: 341 - DNA, 4423 bp, Homo sapiens
ggaaccaaattctgccaccagcacaacaattgcagtttactggagcatgaacaaggaagatgtcattgattcatttcaggtttactgcatggaggagccacaagatgatcaagaagtaaatggtaggattgctaacacaaatacaaatgcatatgcatattcatgcatcttcatgtgaagtatttaaatatacacctgtattatgactcttcccacaaagcagtttatagccatttacaaaacaacaacaaaaccccaacaaccatataatgaaataataactacagaagcaaaatttgggaatcaagatcagggaaaacaaaatggcataaatattataatagtcaacacaaatattgtaattgagattcacatttggctttgagctctcagaataacaggagcaatgaagtggttctcatttagagaaaggaggtaacataccagagtttcaaggaaaataaagtttttaacagtacgaaagcctgaaagacaagtgtcacgtgttccacttttagggaagaagccatagagaggacagtgtgctccacaatgacctgaatgcaaatgaagcatgggatgtcatgggtggcagtttctcaggtctgtctttgctaaaagccaccaacaagccacaagattcattcagtgttcacagttcccagggcgtgggcctaggtatggtgtagtcttcctgtgtcccaaattaatgtgtggatagaaatgaaagtgcttagtagggtgaatggatggtatgtcttacagctgagcctctgtaagtatctctcagctcagaaggacttctaataagccctggaagccaggcagtttgaggttgtgcttcctgatgaatcagagctgggagtgctgccattctgtgttgcttgttgaagacagacccacatactatggaaaacagatgagcatgtggcaggcttggcgtcctaactcaggtgcccaatttgtaatcaggaatgaatggtaatatattatactattactaatatttaagtcttttgaaatgtcatgtgataattaatttagaaaaaagtttaaaaaagcaattataggcatggtgtaaagttggctaaatctgtctgtaatgtcatgactcctgttttattgacctatttccatatgcctgtcacagcacaaccaagtaagtgttactatccctatttgcaagtgagaaaactaatgtgaggttacatagtttgctcaaggccttgcaacttgtacatgaccgggggcaggagtcaaacacacatctttcaggctccaaagtttattcttttgtttgtttgtctctgtgtgtgttttgttacaccatacttcatctccatctatttctagctctatttcatggctctctgagacccttcttatcaaaagaaaattgttgcttggcctgcttttttttttttttactgggtttcacccccaccccaaacacttccctatcctgtgtctcattgtttctgtgccctgaactgtgttaataacagttagctaatctgataatctagtctgtgataccatgtcatgtttagtagggtctctagtcacatatgttatgtacactgttaaagggagtgccagggtaataggatgtattagttcattctcacactgctataaagacatacctgagactgggtaatttatgaagaagaggtttaactggctcacagttccacaaggtgtacaggaagcatggcagaggaggccttaggagacagaatcatggcagaaggtgaaggggaagcaagcacatcttcccatggctggcagggaagagagagagagtaaagcaggaagtgctacacactttcaaacaaccagatctcttgagaactcatttatgagaacagcaagggagaagtccacccccatgattcaatcacctcctaccaggctcttcctccaacactgggaattacaattcaacatgagatctgggtggggacacagaaccaaaccatatcataggaccttgcctaaaagaatgattccagtgaaaattgcagacacagattctgggatatgggagaaatattcttcagtgtacaggtccttatgaggttctttaaactgaactttctgtccagaaagtacagctcattggaaaggagagaggcaattgagaagcctgctaagttgaagagctcccgattttcttttaaagaaacagtctgggttcttaagtggaaaagttttgaagatgtgacattcaagagtcataagggggggaaactgaaattaccataggcaaaatttacaaagaaaatcatatgttttaaaggagataaaatttcagtgagaataatcaaattggcccaaattggtaggtttgttcagaatggtattggataatgtttactattaaaatattcaaagtaagatattttttaaaatttttgaaggcaaatgtcttaattggacaaagttacttcttagagtagcttatgacctatcaaagttatttaagtatttctataaattgtggaaatccctagtggaaagaattctggaattcatgagaagaaaccaggatttgaaacctggaaggtcatactgaataccaaaatagtttactaatctgtaaagatgtttaaaaaccatgaagttgtcctttttttatgacatactcttctgaaatattggcactggttcttaagattttcttgagaatgtgttactgagatttaagctaacatatacattatgtaattttaatattcgctactgaaataagttactttaattgtggtatatgaagctcagaatcttactaatatgctattattttctgagaagtgttaacaagtattactatgtcatcctaagtatctcttttcagaatgctgttgctttcatatgtattctaaggagctggttttcacataatggtatctgtaaggttatcagtttgcattttccactgaaagaaaatcatagatgactttctccagtaactataacttttaattaactttggaagatgtcttcgattttaattgtgtcttatgctagagttggtagaagaatacagactgacagtgaaagaaagctactgcatttttgaagatctggaacctgaccgatgctatcaagtgtgggtgatggctgtgaacttcactggatgtagcctgcccagtgaaagggccatctttaggacaggtaaggagatggatgctaagggtgcattagaagacaacgctcagttcttcacagactcttgagatcagccagtaagtgtttattaagcacctattgtgtgttgagtgttgtgcaaagtgctggttatacaacgatgacttaagcctggggtcctgttctcaagaagctcatgctcaggtggggagatggaaaaacagaggatcatagaaaatgtgtggtaagggccatatccagatatacacaggttattatgagaacactccagaggggcacccaagttggcctggggcaggggcaggatcggaactgcttcctagaactgatgcctgcagaaaatgctttaaaggatcaataggaagtaatgcgttaaaggaggatattccacttgaaaaagacatgagcagaggcatcaaggcaagaaacagtatggagtgtgcaggacactgtaagaagtttggtattatttcttagacttaaacaaaggaaagacaagataagaaaggctaacatagagaggccgtgtttgcaaggtaagaagcttgggctgcgtgtgggtgctgggaacccccaaaaggttttaagcagtggtatttaactggaaatgcattctcacgatgaaatcttttcacagggtaagaagcctaaaccaaggctgcactgcctttaagataatggtaacctgcctcaggggaagaaatagtttactcctaccctttatcctttcctcttgccttttaaaacaagcctttattgagcacctactgaggacaagatcatggctaacttgtgtgtactgggacaggggaaagaatctttattttgatttgcttgtatatgtataaagaaagtctagtgggatttttaggaagctactattaggggctgtttggggatgggtgagaactgggcaatgtggaaggcagagaagggagagagacatcaccatctatatttgatcccttttgggtttttaacacagaatacactttctgatgaaaaattgaaaacagaatcatgccgaagccgtggaagatcatgtgcttctcaggtcccaggaaagcaagctggcattgctccacgactgtcctgactctctttctgcagcaccctccacccctgtgatccgcgctgaggactgtactgtgtgttggaacacagccactatccgatggcggcccaccaccccagaggccacggagacctacactctggagtactgcagacagcactctcctgagggaga

SEQ ID NO: 342 - DNA, 10503 bp, Homo sapiens
actgcttctttagagaaaatgcctgctgcgttttcccttttcgaacattatgatgacagctcggcaagaagtgaccagatgttaaaacaagtggctggtaagcattttaatatattaattacctagatgaaatatggcagtttttgcttgtttgttttgtatgtaatgatatatacaaaagattttgagtgtaaagacatgtaactggaaaaagaaaagtattagttgtaaaatgttacagctagactctgaaattgagcatgggaggaacatcccatttctgtgcatttccatctgaagctttatgacttgcttggagattgaggaggtggaaggagccatggaaccaaagggtctcctctttttttttttctttaatttaaaaataggatttctctccctctcttctcatttgcctcataccagcagccaggtatagaagaaaaaagaagtcaaatgttttcctacgtgtcaaacagatttctctttatgagtggttttcccctcttcaattcagttcttttccccttttttcaaactaaacagatgagcttagagaactatcagctcagcaccatggtctgtagccaggagcctcccactcggctgtcagaagcatcctgccagctcttcacaatattttttaatgtgctattttaacaaacaggacaatgaaacttatttagatttttcaaagctgccatgtttcagtgaagttaccaagtttttcttactgtacaacatgctcaggtgtcctccttaaaagatgctgtagtcttccaaaatcacctcaaagattacagctattcaggaggctgaggcgggaggatcacttgagcctaagggttcgaatccagcctgggcaacatagtaagacccccatgtctaaaaacaacaacaacaacaacaaaaaaccccaaaaaacaaaaacaaaaaagatggctgttgtgtttaaattgatgattaacattcattcctgtacaaagagttttaatttagtaactactaaaaaggctactgtatgtctaaaaagacaaaaacaacacgacaccacacaacacacaaaaacccaaaaccccaccagccctttataaaattaaaaactcaatcattgatcttaatggattttctctagaaatgtctcaaagtgttttcttgtaatgtctttaagagggattagactaggacagtgattgcaaactaagaaagtttgattaacagagctggtcttttgcttttaagggattcattatatgccactgttcatttaggaggatatgcttttcaatacttaatgggcaatgagaggacgtttaatatattttagaggtcacagagttaaaatgtcacaaagtgttaacaattaactcagcaagtgcacatggcggtccctgtggctggaagccttttatggagagactgatctcagagccataaatgttactttgtgcgtctgtttcacaaaattggagcccagggtgttgacttgctgctaagtagtttttgtgcatttggtgacacctctcagaagtcctcacctgtgacctgaaaagttgatctgatgaccccctacctaaactaagcagatacaatgagaaaaggatgtgagttttccaatgagaagtagcagcccatacgatttattccatgcttatacgatggctggcattgtggaaaccgttaagcatatcaaatcatctaatctcaccataacccaaggaggtaggttttgttattcccatttgacaggtgaggaaaggtgaggaaagagaggaacagaaaaatgttctattttcaagaaaacacagccggttggggtgtgtttggcaggggagtttggcttcagagtctgccccacagcgaaaaggcagagtgctgctgagaaagatgagagaaacagatcatgataaacaaacatgaatctaggcttccttgatgctggcacctggggattttttttttaattgtggtaaaatacacataacaaaatttaccatcttgcccatttttaattgtacagtttagtggcattaaggacattcacattgtggtacaaccatcactgccatcctctccagaactcttcatcttgcaaaacagaagctctatatccattaaacactaactctccatattctccccttctcctggctgtggcagccaccattttactttctgtttctgtgaatttgattactctaagtacttcatctaagtggaatcatatggtatttctctttttgtgactggtttgtttaacttagagtaatatcctcaaagcttaccatgttgtaacgtgaaacttttcctcctcttatctattcatccattggtggatacttgggttgcttccactttttggctattgtgaataatgctgctcccctgaggacgttccaaaggccaggttgagtggaaatctgtatctggtcacagattccaaagtccagtttggttaatgcttaactcccccagtgtggtggctctttttgggcacatttcatcaggcagaggggtgattcttctacccaattccttagcctcttataatgaagccctaaactttcattttggtattttttggtatcatacctttttttttttccccacacagagtctcactctgtcgcccaggctgaagtgcagtggcaccatctcggctcactgcaacctccgcctcccgggttcaagccattcttatgcctcagcctccccagtagctgggattacaggcgtgcatcaccatgcccagctaattgttgtatttttagtagacatggggttttgctgtgttggccaggttggtctcctactcctgaactcaagtgatctgccctccttggcctcccaaagtgctgggattacaggcatgagccactgcgcccggccagcatcatacttattcaagtttattactgtaaaagtgtaaacagagttgctaaactccgggtctctgatgttgttctaccacataagaattgtaaatccagccattattattagattatatctatggaatattcttattcccttttcattttagaattctttgaaaagtaaaagtatttcctgtttctgaaaaaaggtgttttacctttaatgcttttgggggaaggagcacattaaaacaaaatttctaacctacatactttgcttcttccttgaaattaagtgattttcttggatcaattaatcagtttttaagtttgttaatttacccgagaaagagagagaaatgtgaaagatgttttcatttttaaaaagcagatacagctccatgtataattcataggataaaagggggagcattttcactgttcatgcctcaagtaattctcaaatactgcttcaaagatgatcgacaatccttgaaacattctgcttggtcctttcatagacctgggtaacatgaaaatttactgaactacatttttctggacagacttatttagaatgtgacatccatttcctgctgggaagacaagcaataaattccaagacagtatcagggtctctgacccgtgatcagttcctggggaggtgctctcaccagcggcctctgccttagcatgcagttcgctcctcaggtcttacctctgtggcctctgtggctttccagatgatgggtccctccttcagccctcatcttcaggagcttcctgccttgcccctctgtttcctgtgctcctgccaaggcccctttgctttctgaatgttagcactggttatctgtcagccactttgctaagcactcgatagatattatttgcttcctataatgacactgggaggtaatactattattattgttttctcattttaaagatggggaaactgaggctgagataacagaggggatggatctggtgtttaaccttgggccagccactctgcattgaagtccatgaacttgacccttctcctcttctgcttctcgtttttcacaactgtgtattttttcagctctttatcgctgttgcatcttctcagtttgtctctttttgctacattctttagacccatttgtgtttttctcatttgtaccttcttgctgaactgatctttatttttcttttcctttggtgtccacttttaataaagtaatctcataaaatttggcccatattattaatatttcagtaaacttatctctcaggaaattgttgactggaaaaaaaacccataaaaaataaatgtaaaaacatgctattgggtcaggtgcagtggctcatgcctgtaatcccagcactttgggaggccgaggcgagcggatcacctgaggtcaaggagtttgagaccagcctggccaacacggtgaaaccccatctctactaaaaatacaaaaaaatgagctgggcgtggtagtgggcgcctgtaatcccagctactagggaggctcaggcagcagaattgattgaacccaggaggtggaggttgcagtgagctgagattgcaccactgcactccagcctgggtgacagagcaagactccatctcaaaaaaaaaaaaaaaaagcatgctattttttcaactatgggaataaccttttcctctaatttgtaaaatatgttcaaagattttatgtcataagttttgggggagaattgcatagaagtttgatttatggcattgcatataccattaatgtttgtacgcataatcatgaactttacaagtttctaggaaaacatccaaggattttgttgtcattaaaattcagaacaacggagttatactaggtgtctaaaatgtatgctgaatcagtaggctactttttctgtagtttttatatattttgtttaatttttaaaaagttagtaattaaaaaaattgatagggctagccatgttggaaagaaaaaatgggatagtcgtttcagaaagtgtattttgatattttatttttgcaagtatttttctggcttgaagatacaccaactatatcttaaaagggtttcatttgcctctatcgtgaatatagaatctatattgatacagaatgatacaaccttggctatctagcaaagcatgtgttttgttttgaaggataagcaagtcagttgttgcctcctctaacctacatgagtttattgctccaactataggactgtagaagagtattctcaagtgatcccattttggaatacatttttgtttatttctgtgtgtattatatatgtgcacatgtacaaatgcatagaaaatattgtggagggatacacattcaacagtgattgcatctaaagaatacagctgggcgcggtggctcacgcctgtaatcccagcactttgggaggctgaggcgggtggaatccttgaggccaggagttcaagaacagcctgaccaatatggtgaacccccacctctactaaaaatacaaaaattagccaggtgtggtggtgcaggcctgtaatcccagctactcaggaggctgaggcaggagaattgcttgaacccgggaggcggaggttgcagtcagccaagattgcgccactgcactccagcctgggtgataaagcaagactccatctcaacagattaaaaaaaaaaattggccggtgtggtggctcatgcctgtgatcccaacactttgggaggccgaggtgggtggatcacctgaggtcagaagttcgagaccatcctggccaaggtgatgaaaccctatctctactaaaaatacaaaaattagccaggtgtggtggcaggcgcctataatcccagcaacttgggaggctgaggcagaagaatcgcttgaatctgggaggcaaaggttgcagtgagccgagatcgtgccactgcactccagcctgggtgacagagtgagactcagtctcaaaaataaataaataaaattaaattaaagttaaaattaaaataaaataaaaaataaaaaaatataattggggttgggggtttgggggaacaagagagcccttctacttttatactatgtatttctgtattctttgaatatttttcaacaagcataagtaacttgtgcccaaaaaattaataaaaacagcattagttacaataaaacttgtttatattccagttccacagcctcctagattagaacctcaggaaccaaattctgccaccagcacaacaattgcagtttactggagcatgaacaaggaagatgtcattgattcatttcaggtttactgcatggaggagccacaagatgatcaagaagtaaatggtaggattgctaacacaaatacaaatgcatatgcatattcatgcatcttcatgtgaagtatttaaatatacacctgtattatgactcttcccacaaagcatttatagccatttacaaaacaacaacaaaaccccaacaaccatataatgaaataataactacagaagcaaaatttgggaatcaagatcagggaaaacaaaatggcataaatattataatagtcaacacaaatattgtaattgagattcacatttggctttgagctctcagaataacaggagcaatgaagtggttctcatttagagaaaggaggtaacataccagagtttcaaggaaaataaagtttttaacagtacgaaagcctgaaagacaagtgtcacgtgttccacttttagggaagaagccatagagaggacagtgtgctccacaatgacctgaatgcaaatgaagcatgggatgtcatgggtggcagtttctcaggtctgtctttgctaaaagccaccaacaagccacaagattcattcagtgttcacagttcccagggcgtgggcctaggtatggtgtagtcttcctgtgtcccaaattaatgtgtggatagaaatgaaagtgcttagtagggtgaatggatggtatgtcttacagctgagcctctgtaagtatctctcagctcagaaggacttctaataagccctggaagccaggcagtttgaggttgtgcttcctgatgaatcagagctgggagtgctgccattctgtgttgcttgttgaagacagacccacatactatggaaaacagatgagcatgtggcaggcttggcgtcctaactcaggtgcccaatttgtaatcaggaatgaatggtaatatattatactattactaatatttaagtcttttgaaatgtcatgtgataattaatttagaaaaaagtttaaaaaagcaattataggcatggtgtaaagttggctaaatctgtctgtaatgtcatgactcctgttttattgacctatttccatatgcctgtcacagcacaaccaagtaagtgttactatccctatttgcaagtgagaaaactaatgtgaggttacatagtttgctcaaggccttgcaacttgtacatgaccgggggcaggagtcaaacacacatctttcaggctccaaagtttattcttttgtttgtttgtctctgtgtgtgttttgttacaccatacttcatctccatctatttctagctctatttcatggctctctgagacccttcttatcaaatagttgttgcttggcctgctttttttttttttttactgggtttcacccccaccccaaacacttccctatcctgtgtctcattgtttctgtgccctgaactgtgttaataacagttagctaatctgataatctagtctgtgataccatgtcatgtttagtagggtctctagtcacatatgttatgtacactgttaaagggagtgccagggtaataggatgtattagttcattctcacactgctataaagacatacctgagactgggtaatttatgaagaagaggtttaactggctcacagttccacaaggtgtacaggaagcatggcagaggaggccttaggagacagaatcatggcagaaggtgaaggggaagcaagcacatcttcccatggctggcagggaagagagagagagtaaagcaggaagtgctacacactttcaaacaaccagatctcttgagaactcatttatgagaacagcaagggagaagtccacccccatgattcaatcacctcccaccaggctcttcctccaacactgggaattacaattcaacatgagatctgggtggggacacagaaccaaaccatatcataggaccttgcctaaaagaatgattccagtgaaaattgcagacacagattctgggatatgggagaaatattcttcagtgtacaggtccttatgaggttctttaaactgaactttctgtccagaaagtacagctcattggaaaggagagaggcaattgagaagcctgctaagttgaagagctcccgattttcttttaaagaaacagtctgggttcttaagtggaaaagttttgaagatgtgacattcaagagtcataagggggggaaactgaaattaccataggcaaaatttacaaagaaaatcatatgttttaaaggagataaaatttcagtgagaataatcaaattggcccaaattggtaggtttgttcagaatggtattggataatgtttactattaaaatattcaaagtaagatattttttaaaatttttgaaggcaaatgtcttaattggacaaagttacttcttagagtagcttatgacctatcaaagttatttaagtatttctataaattgtggaaatccctagtggaaagaattctggaattcatgagaagaaaccaggatttgaaacctggaaggtcatactgaataccaaaatagtttactaatctgtaaagatgtttaaaaaccatgaagttgtcctttttttatgacatactcttctgaaatattggcactggttcttaagattttcttgagaatgtgttactgagatttaagctaacatatacattatgtaattttaatattcgctactgaaataagttactttaattgtggtatatgaagctcagaatcttactaatatgctattattttctgagaagtgttaacaagtattactatgtcatcctaagtatctcttttcagaatgctgttgctttcacatgtattctaaggagctggttttcacataatggtatctgtaaggttatcagtttgcattttccactgaaagaaaatcatagatgactttctccagtaactataacttttaattaactttggaagatgtcttcgattttaattgtgtcttatgctagagttggtagaagaatacagactgacagtgaaagaaagctactgcatttttgaagatctggaacctgaccgatgctatcaagtgtgggtgatggctgtgaacttcactggatgtagcctgcccagtgaaagggccatctttaggacaggtaaggagatggatgctaagggtgcattagaagacaacgctcagttcttcacagactcttgagatcagccagtaagtgtttattaagcacctattgtgtgttgagtgttgtgcaaagtgctggttatacaacgatgacttaagcctggggtcctgttctcaagaagctcatgctcaggtggggagatggaaaaacagaggatcatagaaaatgtgtggtaagggccatatccagatatacacaggttattatgagaacactccagaggggcacccaagttggcctggggcaggggcaggatcggaactgcttcctagaactgatgcctgcagaaaatgctttaaaggatcaataggaagtaatgcgttaaaggaggatattccacttgaaaaagacatgagcagaggcatcaaggcaagaaacagtatggagtgtgcaggacactgtaagaagtttggtattatttcttagacttaaacaaaggaaagacaagataagaaaggctaacatagagaggccgtgtttgcaaggtaagaagcttgggctgcgtgtgggtgctgggaacccccaaaaggttttaagcagtggtatttaactggaaatgcattctcacgatgaaatcttttcacagggtaagaagcctaaaccaaggctgcactgcctttaagataatggtaacctgcctcaggggaagaaatagtttactcctaccctttatcctttcctcttgccttttaaaacaagcctttattgagcacctactgaggacaagatcatggctaacttgtgtgtactgggacaggggaaagaatctttattttgatttgcttgtatatgtataaagaaagtctagtgggatttataggaagctactattaggggctgtttggggatgggtgagaactgggcaatgtggaaggcagagaagggagagagacatcaccatctatatttgatcccttttgggtttttaacacagaatacactttctgatgaaaaattgaaaacagaatcatgccgaagccgtggaagatcacgtgcttctcaggtcccaggaaagcaagctggcattgctccacgactgtcctgactctctttctgcagcaccctccacccctgtgatccgcgctgaggactgtactgtgtgttggaacacagccactatccgatggcggcccaccaccccagaggccacggagacctacactctggagtactgcagacagcactctcctgagggaga

SEQ ID NO: 343 - DNA, 144 bp, Homo sapiens
aaaaaaattggccggtgtggtggctcatgcctgtgatcccaacactttgggaggccgaggtgggtggatcacctgaggtcagaagttcgagaccatcctggccaaggtgatgaaaccctatctctactaaaaatacaaaaatta

SEQ ID NO: 344 - DNA, 2396 bp, Homo sapiens
cctaactcaggaaactaatagtgagcttgtgtataatgtaaatcggaatgtctccatgatagattggtaacattaaggagctaattacatgtatattatcatggagacatacctgcctctccaaaagcatgaaatatgtaaagagattcttctaggaaaaaagaaatgtgacgctctctcaccaagatgctgaagctgacattcatcaataagcagctgtgcatccactaggcatttggtaaatgttaacttatctaccgaggtggtgttttcttagcctcccacctccttgctgtggagcagcttcatgtaccatgatgcatattcagatcattcttaatactcatattttgatagagaggtttttaggttttcttttaaaccaagtttattgagataaactactttggtaggatatggaacttaggaataatggtatgaaactagacagcttttttttttttattacactttaagttctgggatatgtgttcagaacatgcaggtttgttacataggtatacacgtgccatggtggtttgctgcacccatcaacctgtcatctgtattcggtgtttctcctaattctatccctcccctacccccctgcccccaaaaaggccccagtgtgtgatggtcccctccctgtgtccatgtgttctcattgttcaactcccacttatgagtgagaacatgaggtgtttggttttttcttcctgtgttagtttgctgagaatgatggcttccagcttcatccatgtccctgcaaaggacatgaactcagtccttttttatggctgcatagtatttcgtggtatataagtgccacattttctttatccagtctatcatttgggttggttccaaatctttgctattgtgaatagtgccgcaataaacatacgtgtgcatgtgtctttatagtagaatgacttataatcctttgggtatataccccataataggattgctgggtcaaatggtatttctggttctagatccttgaggaatcgccacactgtcttccacaatggttgaactaatttacactcccaccaacagtgtaaaagcattcctatttctccacatcctctccagcatctgttgtttcctgactttttaatgactgccattctaactggtgtgagatggtatctcattgtggttttgatttgcatttctctaatgaccagtgatgatgagctttttttcatatgtttgttggcagcataaatgtcttcttttgagaagtatctgttcatatcctttgcccactttttgatggggtttttttttcttgtaaatttgtttaagttccttgtagattctggatataagccctttgtcagatggatagattgcaaaaattttctcccattctgtaggttgcctgttcactctgatgatagtttcttttgctgtgcagatgctctttagtttaattagatcccactggtggattttggcttttgttgccattgcttttggtgttttagtcatgaagtctttgcccatgcctatgtcctgaatggtattgcctaggttttcttctagcgtttttatggttttaggtcttacgtttaagtctttaatccatcttgagttaatttttgtataaggtgtaaggaaggggtccagtttcaattgtctgcttatggctagccagtttttccaacaccatttattcaatagggaatcctttccccgttgcttgttcttgtcaggtttgtcaaagttcagctggttgtagatgtgtggcattatttctgaggcctctgttctgttttattggtctatatatctgttttggtaccagtaccatgctgttttggttactgtagccttgtagtatagtttgaagtcaggtagcatgatgcctccagctttgttctttttgcttaggattgtcttggctatgcaggctcttttttggttccatatgaaatttgaagtagttttttccaattctgtgaagaaagtcagtggtagcttggtggggatagcattgaatctgtaaattcctttgggctgtatggccattttcacaatattggttctttctatccatgagcatggaatgtttttccatttgtttgtgttctttcttatttctttgagcagtggtttgtagttctccttgaagaggtccttcatatcccttgtaagttgtattcctaggtatttaattctctttgtagcaattgggaatgggcattcactcatgatttggctctgtgtttgtctattatggttgtacaggaatgcttgtgatttttgcacattgattttgtatcctgagaatttgctgaagttgcttatcagcttaaggagattttaggctgagatgatggggttttctaaatatacaatcatgtcatctgcaaacacagacaatt

SEQ ID NO: 345 - DNA, 1684 bp, Homo sapiens
cctaactcaggaaactaatagtgagcttgtgtataatgtaaattggaatgtctccatgatagattggtaacattaaggagctaattacatgtatattatcatggagacatacctgcctctccaaaagcatgaaatatgtaaagagattcttctaggaaaaaagaaatgtgacgcactctcaccaagatgctgaagctgacattcatcaataagcagctgtgcatccactaggcatttggtaaatgttaacttatctaccgaggtggtgttttcttagcctcccacctccttgctgtggagcagcttcatgtaccatgatgcatattcagatcattcttaatactcatattttgatagagaggtttttaggttttcttttaaaccaagtttattgagataaactactttggtaggatatggaacttaggaataatggtatgaaactagacagcttttttttttttattacactttaagttctgggatatgtgttcagaacatgcaggtttgttacataggtatacacgtgccatggtggtttgctgcacccatcaacctgtcatctgtattcggtgtttctcctaattctatccctcccctacccccctgcccccaaaaaggccccagtgtgtgatggtcccctccctgtgtccatgtgttctcattgttcaactcccacttatgagtgagaacatgaggtgtttggttttttcttcctgtgttagtttgctgagaatgatggcttccagcttcatccatgtccctgcaaaggacatgaactcagtccttttttatggctgcatagtatttcgtggtatataagtgccacattttctttatccagtctatcatttgggttggttccaaatctttgctattgtgaatagtgccgcaataaacatacgtgtgcatgtgtctttatagtagaatgacttataatcctttgggtatataccccataataggattgctgggtcaaatggtatttctggttctagatccttgaggaatcgccacactgtcttccacaatggttgaactaatttacactcccaccaacagtgtaaaagcattcctatttctccacatcctctccagcatctgttgtttcctgactttttaatgactgccattctaactggtgtgagatggtatctcattgtggttttgatttgcatttctctaatgaccagtgatgatgagctttttttcatatgtttgttggcagcataaatgtcttcttttgagaagtatctgttcatatcctttgcccactttttgatggggtttttttttcttgtaaatttgtttaagttccttgtagattctggatataagccctttgtcagatggatagattgcaaaaattttctcccattctgtaggttgcctgttcactctgatgatagtttcttttgctgtgcagatgctctttagtttaattagatcccactggtggattttggcttttgttgccattgcttttggtgttttagtcatgaagtatttgcccatgcctatgtcctgaatggtattgcctaggttttcttctagcgtttttatggttttaggtcttacgtttaagtctttaatccatcttgagttaatttttgtataaggtataaggaaggggtccagtttcaattgtctgcttatggctagccagtttttccaacaccattta

SEQ ID NO: 346 - DNA, 4756 bp, Homo sapiens
agccaatcagcgtcgccacgactcccgactataaagtccccatccggactcaagaagttctcaggactcagaggctgggatcatggtagatggaaccctccttttactcctctcggaggccctggcccttacccagacctgggcgggtgagtgcggggtcgggatggaaacggcctctaccgggagtagagaggggccggcccggcgggggcgaaggactcggggagccgcgccgggaggagggtcgggccgatctcagcccctcctcgcccccaggctcccactccttgaagtatttccacacttccgtgtcccggcccggccgcggggagccccgcttcatctctgtgggctacgtggacgacacccagttcgtgcgcttcgacaacgacgccgcgagtccgaggatggtgccgcgggcgccgtggatggagcaggaggggtcagagtattgggaccgggagacacggagcgccagggacaccgcacagattttccgagtgaacctgcggacgctgcgcggctactacaatcagagcgaggccggtgagtgaccccggccaggggagcaggtcacgacccctccccatcccccacggacggcgcgggtcccctcgaatcttcgggtcccagattcaccccaaggctgcggaacccgcccagaccctagaccggggagagtctcaggcgcctttacccggttctttttcagtttaggccaaaatgcccacagggtggtggcgacgggggcggggcttggtgggcgggactgactaaggggcggggccagggtctcacaccctgcagtggatgcatggctgcgagctggggcccgacaggcgcttcctccgcgggtatgaacagttcgcctacgacggcaaggattatctcaccctgaatgaggacctgcgctcctggaccgcggtggacacggcggctcagatctccgagcaaaagtcaaatgatgcctctgaggcggagcaccagagagcctacctggaagacacatgcgtggagtggctccacaaatacctggagaaggggaaggagacgctgcttcacctgggtaagagggtccacagggctactctcccatctccttcttgggctaggactgtgcccacagctgacagacctcaaacagtagaagaaacagggatggaggccagaataccactcctcccttggatcaggagagggagctgtcacctgaggtacaggagatcctataccacagagtgactctcttaaagggccagacctctctcaggggcaattaaggaatctagtctcgctggagattccatccttcagatgaactgatgagcagttctctttgactcccagtattaggaatcacgggggagtttctctcgtgcctgattctcagccccacaccaagagtttttggaggtctgactccagcttttctcagtcactcagcatccacacaggccaggaccagaaatcccttttcaccttctaccctgggctagctcatcccgattctagaactttccaaggaataagaggctatcccagatccctaagtccaggctggtgtcaaggttttgtcctcttctcctactataattgtcctcttccttctcaggatggtcacatgggtgctgctggagtgtcccatgagagatacaaagtgcctgaattttctgactcttcccctcagagcccccaaagacacacgtgactcaccaccccatctctgaccatgaggccaccctgaggtgctgggccctgggcttctaccctgcggagatcacactgacctggcagcaggatggggagggccatacccaggacacggagctcgtggagaccaggcctgcaggggatggaaccttccagaagtgggcagctgtggtggtgccttctggagaggagcagagatacacgtgccatgtgcagcatgaggggctacccgagcccgtcaccctgagatggagtaaggagggggatgggaggtcatgtctcttctcagggaaagcgggagcccttctggagcccttccgcagggtcagggctgaggcctgggggtcagggccccttacgttcccctcttttcccagagccggcttcccagcccaccatccccatcgtgggcatcattgctggcctggttctccttggatctgtggtctctggagctgtggttgctgctgtgatatggaggaagaagagctcaggtggggaagggagaagggtggggtctgagttttcttgtcccactgggtgtttcaagccctaggtaaaagtgtgtcctgcctcgttactgggaagcaccatccacacacacgagcctacccagcctggggccctgtgtgccagcacctactctttttttttgagacggagtcttggctctgtcacccaggctggagtgcaatggcgtggtttcagctcactgcaacctccgcctcccaggttcaagcaattctcctgcctcagcctccctagtagctgggactacacatgcgtgccaccacacctggctaatttttttttttgtatttttagtggagatggggtttcactatgttggccaggctggtctcgaactcctgactttgtgatctgcctgcctcggcctcccaaagtgctgggattacagtcgtgagccaccgcacccagccgcacctactcttttgtaaagcacctgtgacaatgaaggacagatttatcaccttgacgattgtggtgatggggacctgatcccagcagtcacaggtcacaggggaaggtccctgctgaagacagacctcagaagggcagttgatccaggacccacacctgctttcttcacgtttcctgatcctgccctgggtctgcagtcacagttcaggaaacttctctgggatccaaaactaggaggttcctctaggaccttatggccctgcctcctccctggcccctcacaggacattttcttccaacaggtggaaaaggagggagctactctaaggctgagtgtaagtgcggggcgggagcgtggaggagctcgcccaccctataattcctcctgcaccacatctcctgtgggctctgaccaggtcttgtttttgttctaccccagggagcgacagtgcccaggggtctgagtctcacagcttgtaaaggtgagattctgggggtctgaagtgggtggagggtggggcagaggggacaggactgggttgtggggattttttgattcagaatttttgagtgtgtggtgggctgttcagagtgtcatcacttaccgtgactgacctgaatttgttcatgactattttcttctgtagcctgagacagctgccttgtgtgcgactgagatgcacagctgccttgtgtgcgactgagatgcaggatttcctcacgcctcccctatgtgtcttaggggactctggcttctctttttgcaagggcctctgaatctgtctgtgtccctgttagcacaatgtgaggaggtagagaaacagtccacctctgtgtctaccatgacccccttcctcacactgacctgtgttccttccctgttctcttttctattaaaaataagaacctgggcagagtgcggcagctcatgcctgtaatcccagcacttagggaggccgaggagggcagatcacgaggtcaggagatcgaaaccatcctggctaacacggtgaaaccccgtctctactaaaaaatacaaaaaattagctgggcgcagaggcacgggcctgtagtcccagctactcaggaggcggaggcaggagaatggcgtcaacccgggaggcggaggttgcagtgagccaggattgtgcgactgcactccagcctgggtgacagggtgaaacgccatctcaaaaaataaaaattaaaaaataaaaaaagaacctggatctcaatttaatttttcatattcttgcaatgaaatggacttgaggaagctaagatcatagctagaaatacagataattccacagcacatctctagcaaatttagcctattcctattctctagcctattccttaccacctgtaatcttgaccatataccttggagttgaatattgttttcatactgctgtggtttgaatgttccctccaacactcatgttgagacttaatccctaatgtggcaatactgaaaggtggggcctttgagatgtgattggatcgtaaggctgtgccttcattcatgggttaatggattaatgggttatcacaggaatgggactggtggctttataagaagaggaaaagagaactgagctagcatgcccagcccacagagagcctccactagagtgatgctaagtggaaatgtgaggtgcagctgccacagagggcccccaccagggaaatgtctagtgtctagtggatccaggccacaggagagagtgccttgtggagcgctgggagcaggacctgaccaccaccaggaccccagaactgtggagtcagtggcagcatgcagcgcccccttgggaaagctttaggcaccagcctgcaacccattcgagcagccacgtaggctgcacccagcaaagccacaggcacggggctacctgaggccttgggggcccaatccctgctccagtgtgtccgtgaggcagcacacgaagtcaaaagagattattctcttcccacagataccttttctctcccatgaccctttaacagcatctgcttcattcccctcaccttcccaggctgatctgaggtaaactttgaagtaaaataaaagctgtgtttgagcatcatttgtatttca

SEQ ID NO: 347 - DNA, 4756 bp, Homo sapiens
agccaatcagcgtcgccacgactcccgactataaagtccccatccggactcaagaagttctcaggactcagaggctgggatcatggtagatggaaccctccttttactcctctcggaggccctggcccttacccagacctgggcgggtgagtgcggggtcgggatggaaacggcctctaccgggagtagagaggggccggcccggcgggggcgaaggactcggggagccgcgccgggaggagggtcgggccgatctcagcccctcctcgcccccaggctcccactccttgaagtatttccacacttccgtgtcccggcccggccgcggggagccccgcttcatctctgtgggctacgtggacgacacccagttcgtgcgcttcgacaacgacgccgcgagtccgaggatggtgccgcgggcgccgtggatggagcaggaggggtcagagtattgggaccgggagacacggagcgccagggacaccgcacagattttccgagtgaatctgcggacgctgcgcggctactacaatcagagcgaggccggtgagtgaccccggccaggggagcaggtcacgacccctccccatcccccacggacggcgcgggtcccctcgaatcttcgggtcccagattcaccccaaggctgcggaacccgcccagaccctagaccggggagagtctcaggcgcctttacccggttctttttcagtttaggccaaaatgcccacagggtggtggcgacgggggcggggcttggtgggcgggactgactaaggggcggggccagggtctcacaccctgcagtggatgcatggctgcgagctggggcccgacgggcgcttcctccgcgggtatgaacagttcgcctacgacggcaaggattatctcaccctgaatgaggacctgcgctcctggaccgcggtggacacggcggctcagatctccgagcaaaagtcaaatgatgcctctgaggcggagcaccagagagcctacctggaagacacatgcgtggagtggctccacaaatacctggagaaggggaaggagacgctgcttcacctgggtaagagggtccacagggctactctcccatctccttcttgggctaggactgtgcccacagctgacagacctcaaacagtagaagaaacagggatggaggccagaataccactcctcccttggatcaggagagggagctgtcacctgaggtacaggagatcctataccacagagtgactctcttaaagggccagacctctctcaggggcaattaaggaatctagtctcgctggagattccatccttcagatgaactgatgagcagttctctttgactcccagtattaggaatcacgggggagtttctctcgtgcctgattctcagccccacaccaagagtttttggaggtctgactccagcttttctcagtcactcagcatccacacaggccaggaccagaaatcccttttcaccttctaccctgggctagctcatcccgattctagaactttccaaggaataagaggctatcccagatccctaagtccaggctggtgtcaaggttttgtcctcttctcctactataattgtcctcttccttctcaggatggtcacatgggtgctgctggagtgtcccatgagagatacaaagtgcctgaattttctgactcttcccctcagagcccccaaagacacacgtgactcaccaccccatctctgaccatgaggccaccctgaggtgctgggccctgggcttctaccctgcggagatcacactgacctggcagcaggatggggagggccatacccaggacacggagctcgtggagaccaggcctgcaggggatggaaccttccagaagtgggcagctgtggtggtgccttctggagaggagcagagatacacgtgccatgtgcagcatgaggggctacccgagcccgtcaccctgagatggagtaaggagggggatgggaggtcatgtctcttctcagggaaagcgggagcccttctggagcccttccgcagggtcagggctgaggcctgggggtcagggccccttacgttcccctcttttcccagagccggcttcccagcccaccatccccatcgtgggcatcattgctggcctggttctccttggatctgtggtctctggagctgtggttgctgctgtgatatggaggaagaagagctcaggtggggaagggagaagggtggggtctgagttttcttgtcccactgggtgtttcaagccctaggtaaaagtgtgtcctgcctcgttactgggaagcaccatccacacacacgagcctacccagcctggggccctgtgtgccagcacctactctttttttttgagacggagtcttggctctgtcacccaggctggagtgcaatggcgtggtttcagctcactgcaacctccgcctcccaggttcaagcaattctcctgcctcagcctccctagtagctgggactacacatgcgtgccaccacacctggctaatttttttttttgtatttttagtggagatggggtttcactatgttggccaggctggtctcgaactcctgactttgtgatctgcctgcctcggcctcccaaagtgctgggattacagtcgtgagccaccgcacccagccgcacctactcttttgtaaagcacctgtgacaatgaaggacagatttatcaccttgacgattgtggtgatggggacctgatcccagcagtcacaggtcacaggggaaggtccctgctgaagacagacctcagaagggcagttgatccaggacccacacctgctttcttcacgtttcctgatcctgccctgggtctgcagtcacagttcaggaaacttctctgggatccaaaactaggaggttcctctaggaccttatggccctgcctcctccctggcccctcacaggacattttcttccaacaggtggaaaaggagggagctactctaaggctgagtgtaagtgcggggcgggagcgtggaggagctcgcccaccctataattcctcctgcaccacatctcctgtgggctctgaccaggtcttgtttttgttctaccccagggagcgacagtgcccaggggtctgagtctcacagcttgtaaaggtgagattctgggggtctgaagtgggtggagggtggggcagaggggacaggactgggttgtggggattttttgattcagaatttttgagtgtgtggtgggctgttcagagtgtcatcacttaccgtgactgacctgaatttgttcatgactattttcttctgtagcctgagacagctgccttgtgtgcgactgagatgcacagctgccttgtgtgcgactgagatgcaggatttcctcacgcctcccctatgtgtcttaggggactctggcttctctttttgcaagggcctctgaatctgtctgtgtccctgttagcacaatgtgaggaggtagagaaacagtccacctctgtgtctaccatgacccccttcctcacactgacctgtgttccttccctgttctcttttctattaaaaataagaacctgggcagagtgcggcagctcatgcctgtaatcccagcacttagggaggccgaggagggcagatcacgaggtcaggagatcgaaaccatcctggctaacacggtgaaaccccgtctctactaaaaaatacaaaaaattagctgggcgcagaggcacgggcctgtagtcccagctactcaggaggcggaggcaggagaatggcgtcaacccgggaggcggaggttgcagtgagccaggattgtgcgactgcactccagcctgggtgacagggtgaaacgccatctcaaaaaataaaaattgaaaaataaaaaaagaacctggatctcaatttaatttttcatattcttgcaatgaaatggacttgaggaagctaagatcatagctagaaatacagataattccacagcacatctctagcaaatttagcctattcctattctctagcctattccttaccacctgtaatcttgaccatataccttggagttgaatattgttttcatactgctgtggtttgaatgttccctccaacactcatgttgagacttaatccctaatgtggcaatactgaaaggtggggcctttgagatgtgattggatcgtaaggctgtgccttcattcatgggttaatggattaatgggttatcacaggaatgggactggtggctttataagaagaggaaaagagaactgagctagcatgcccagcccacagagagcctccactagagtgatgctaagtggaaatgtgaggtgcagctgccacagagggcccccaccagggaaatgtctagtgtctagtggatccaggccacaggagagagtgccttgtggagcgctgggagcaggacctgaccaccaccaggaccccagaactgtggagtcagtggcagcatgcagcgcccccttgggaaagctttaggcaccagcctgcaacccattcgagcagccacgtaggctgcacccagcaaagccacaggcacggggctacctgaggccttgggggcccaatccctgctccagtgtgtccgtgaggcagcacacgaagtcaaaagagattattctcttcccacagataccttttctctcccatgaccctttaacagcatctgcttcattcccctcaccttcccaggctgatctgaggtaaactttgaagtaaaataaaagctgtgtttgagcatcatttgtatttca

SEQ ID NO: 348 - DNA, 4096 bp, Homo sapiens
cacgcctgtaatcccagcactttgggaggctgaggcaggcagatcacgaggtcaggagatcgagaccatcctggctaacacgatgaaaccccgtctttactaaaaatacaaaaaattagccgggcgtggtggcaggtgcctgtggtcccagctactcaggaggctgaggcaggagaatggcgtcaaccaggaggtggaggtggcagtgagccgagatcacgccactgcactccagcctgggtgacagagcgagactccgtctcaaaaaaaaaaaaaaaagaaaagaaaagaaaagaaaaaagaagaagatacttgaacaagcatattgatagcagcacaattggtgattgcaaaaatatggaaccagcccaaatgcccatcaatcaatgaatggataaagaaaatgtaattttatatatatctatatctatatatatctatatctatatatagatatatagatatataatggaatactacacagtcataaaaagaaaggaaataatggcattcaaagcaacctggatggagctggagaccattattctgagtgaattaactccggaatggaaaaccaagcattgtatgttctcacttataaatgggagctaagctatgagaacacaaaggcttaagaatgatacaatggactttgggaactggcgggggaagggtgggagggagctgagggatacaagactacacattgtgtacagtgtacactaatcaggtgctggatgcgccaaaatcttggaaatcaccactaaagaacttatccatgtaaacaaacaccacctgttcccccaaaactattgaaatttaaaaatgttttaaataaataaaatttaaaaggattaaaaatggattatttgctttcaaaaaaaaagaaatcaccacttgcacagtttttatgtaatgtgaaatatgaatatccacaattacatgaaaagctgttaaaaataatcctcccagtccgggcatggtagctcacacatgttgttccagctactgggaaggctgaggtgagagaatcccttgagcccaggagttctaggctgcagtgagctattatggtgccactgcactccagcctgggtgacagagcgagaccctgtctctaaacaacagcaataataatccttccttcctgagtcagacgggcatggagacgcttctggaaggaacaccgcaatggctgcgcagggacagccccaggtccagttcaaacttgtattggttggtgatggtggtactggaaaaacgactttcgtgaaacatcatttgactggtgaatttgagaagaagtatgtagccaccttgggtgttgaggttcatcccctagtgttccataccaacagaggacctgttaagttcaatgtatgggacacagccggcctggagaaattcagtggactgagagatggctattatatccaagcccagagtaccatcatagtgtttgatgtaacatcgagagttacttacaagaatgtgcctaactggcatagagatctggtatgagtgtgtgaaaacacccccactgtgttgagtggcaacaaagtggatattaaggacaggaaagtgaaggcgaaatccattgtcttccaccgaaagaagaatcttcagtactacgacatttctgccaaaagtaactataactttgaaaagcccttcctctggcttgctaggaagctcattggagaccctaacttggaatttgttgccatgcctgctctcgccccaccagaagttgtcatggacccagctttggcagcacagtatgagcacgacttagaggttgctcagacaactgctctcccggacgaggatgatgacctgtgagaatgaagctggagcccagcgtcagaagtctagttttataggcagctgtcctgtgatgtcagttgtgcagcgtgtgtgccacctcattattatctagctaagcggaacatgtgcttcatctgtgggatgctgaaggagatgagtgggcttcgcagtgaatgtggcagttcaaaaaataccttcattgtttggacctgcatatttagctgttttggaacacagttgattccttgagtttcaaatatagactgctacagtcacatcacaatattcagcggtgaaatcttgtttgttactgtcattcccattccttttcgtttagaatcagaataaagttgtatttcaaatatctaaaaacaaaaaatccttcctttttcaactcaatatttgtgtaaggctagattttttaacatatacacttcaatcaaagtaagaaaatggctgggatgcagctggaggccataatcctaagtgaattaatgcaggaacagaaaaccaaatactgcatcttctcacttataattgggagctaaacactgagcacacatagacataaacatgtgtataacagacactgtagacgactagagtggagagggtggggacgtgggttgaaaaactacctgtgggtactatgttcactacctgagtgacaggatccataccccaaacctcagcatcagacaacatacccatgtaacaaaccggcacatgtaacccctgtatctatttttttctggttttttttttttttttttgagacaatttcactcttgttgctcaggctggagcgcaatggcgtgatctcggctcatcgcaacctctgcctcccgggttcaagcgattctcctgcctcagcctcctgagtaggtgggattacaggtatgcgccaccacctccagctaattttgtatttttagtagacatggggtttctccatattgataaggctggtctcgaactcccgactgggattacaggcgtgagccaccgcgcctggccaccccctgtatctaaaataaaagttaaaaatttaaaaataagtacataagagaatgtatgctatgagccaagaatgatgcttgcaaaattttgcaagaacaacacttatgaaaatgaaaaataatcactcttcttgttaccaaaaatcttggtagctgcagaaggtgggatctttcctcactgggagtcgcagagccaatacatgaaaccaaaagtgagccttaagcagagcaagctttatttcctgcacaggacttgtaaagaggagagcagctctgccaagtcaacttctccactagtgaggcggctagtgaggggtgagggggctaaaatgtaggattgctctaatgaaggggttgggcattaaaagtgagggggaggaatattcatatgttttatgggaacaggcagtgaacttctccaaactggtaataccgctttccttttggtccttttaggacttcttctactcatcgtcatggagatcgtcaactgtcatggcatggatgggagcgcaatttagcctggaaacgggattacaatgaagcatgaggtctttttgaagtcatttggccggctctcttggttgtaacgagtctcagctggtttgactacaaaggcaacttcttgaagcagatcctgtttttttgtttttgtttttgttttttgtttcttgttttttccccctagacatctcactctgtcgcccaggctggagtgcagtggtgtgatctcggctcactgcaaccaccacctctcgggttcaagcaattctcctatctcagcctccagagttgctggaattacaggcgcgcaccaccacacccggctaatttttgtattgttagtagagacagggtttcatcatgttggccaggttagtcttgaactcctgacctcgtgatctgcctgcctcggcctaccaaaatgctgcgattacaggcgtgagccaccgttcccggcctatacgttgtttattttggaaaaattaaaaattaagttttttttcattaaagatatgttatttccgatcaagagatcaagaccatcctggccaacatggtgaaaccccgtctctactaaaaacacaaaaattagctgggtgtggtggcacacgcctgtagttccagttactggggaggctgaggcaggagaatcgcttgaacccgggagaaggaggttgcagtgagccgagatcatgccactgcactccagcctggggacagagcaagactctgactcaaaaaaaaaa

SEQ ID NO: 349 - DNA, 115 bp, Homo sapiens
ggaggctgaggcaggagaatcgcttgaacccgggagaaggaggttgcagtgagccgagatcatgccactgcactccagcctggggacagagcaagactctgactcaaaaaaaaaa

SEQ ID NO: 350 - DNA, 1892 bp, Homo sapiens
attctccccagacgccaaggatggtggtcatggcgccccgaaccctcttcctgctgctctcgggggccctgaccctgaccgagacctgggcgggtgagtgcggggtcaggagggaaacggcccctgcgcggaggagggaggggccggcccggcgggggcgcaggactcggcagccgcgccgggaggagggtcgggcgggtctcaacccctcctcgcccccaggctcccactccatgaggtatttcagcgccgccgtgtcccggcccggccgcggggagccccgcttcatcgccatgggctacgtggacgacacgcagttcgtgcggttcgacagcgactcggcgtgtccgaggatggagccgcgggcgccgtgggtggagcaggaggggccggagtattgggaagaggagacacggaacaccaaggcccacgcacagactgacagaatgaacctgcagaccctgcgcggctactacaaccagagcgaggccagtgagtaactccggcccagggagcagatcacgacccccacctccatgccccacggacggcccgggtactcccgagtctccgggtctgggatccaccccgaggccgcgggacccgcccagaccctctacctgggagaaccccaaggcgcctttaccaaaatccccgcgggtgggtccgggcgagggcgaggctcggtgggcggggctgaccgagggggtggggccaggttctcacaccctccagtggatgattggctgcgacctggggtccgacggacgcctcctccgcgggtatgaacagtatgcctacgatggcaaggattacctcgccctgaacgaggacctgcgctcctggaccgcagcggacactgcggctcagatctccaagcgcaagtgtgaggcggccaatgtggctgaacaaaggagagcctacctggagggcacgtgcgtggagtggctccacagatacctggagaacgggaaggagatgctgcagcgcgcgggtaccaggggcagtggggcgcctccctgatctcctgtagacctctcagcctggcctagcacaaggagaggaggaaaatgggaccaacactagaatatcgccctccctctggtcctgagggagaggaatcctcctgggtttccagatcctgtaccagagagtgattctgagggtccgtcctgctctctgggacaattaagggatgaagtctctgagggagtggaggggaagacaatccctggaagactgatcaggggttccctttgaccccacagcagccttggcaccaggacttttcccctcaggccttgttctctgcctcacactcaatgtgtgtgggggtctgactccagctcctctgagtcccttggcctccactcaggtcagaaccggaggtccctgctcccccgctcagagactagaactttccaaggaataggagattatcccaggtgcccgtgtccaggctggtgtctgggttctgtgctcccttccccaccccaggtatctggttcattcttaggatggtcacatccaggtgctgctggagtgtcccatgagagatgcaaagtgcttgaattttctgactcttcctttcagacccccccaagacacacgtgacccaccaccctgtctttgactatgaggccaccctgaggtgctgggccctgggcttctaccctgcggagatcatactgacctggcagcgggatggggaggaccagacccaggacgtggagctcgtggagaccaggcctgcaggggatggaaccttccagaagtgggcagctgtggtggtgccttctggagaggagcagagatacacgtgccatgtgcagcatgaggggctgccggagcccctcatgctgagatggagtaaggagggagatggaggcatc

SEQ ID NO: 351 - DNA, 3372 bp, Homo sapiens
gttctaaagtccccagtcacccacccggactcggattctccccagacgccgagatgcgggtcatggcgccccgaaccctcatcctgctgctctcgggagccctggccctgaccgagacctgggcctgtgagtgcgaggttgggagggaaacggcctctgcggagaggagcgaggggcccgcccggcgagggcgcaggacccggggagccgcgcagggaggagggtcgggcgggtctcagcccctcctcgcccccaggctcccactccatgaggtatttctacaccgccgtgtcccggcccggccgcggagagccccgcttcatcgcagtgggctacgtggacgacacgcagttcgtgcagttcgacagcgacgccgcgagtccaagaggggagccgcgggcgccgtgggtggagcaggaggggccggagtattgggaccgggagacacagaagtacaagcgccaggcacagactgaccgagtgagcctgcggaacctgcgcggctactacaaccagagcgaggccggtgagtgaccccggcccggggcgcaggtcacgacccctccccatcccccacggacggcccgggtcgccccgagtctcccggtctgagatccaccccgaggctgcggaacccgcccagaccctcgaccggagagagccccagtcacctttacccggtttcattttcagtttaggccaaaatccccgcgggttggtcggggctggggcggggctcgggggacggggctgaccacgggggcggggccagggtctcacaccctccagaggatgtatggctgcgacctggggcccgacgggcgcctcctccgcgggtataaccagttcgcctacgacggcaaggattacatcgccctgaatgaggacctgcgctcctggaccgccgcggacaaggcggctcagatcacccagcgcaagtgggaggcggcccgtgaggcggagcagcggagagcctacctggagggcacgtgcgtggagtggctccgcagatacctggagaacgggaagaagacgctgcagcgcgcgggtaccaggggcagtggggagccttccccatctcctgtagatctcccgggatggcctcccacgaggaggggaggaaaatgggatcagcgctggaatatcgccctcccttgaatggagaatgggatgagttttcctgagtttcttctgagggccccctctgctctctaggacaattaagggatgaagtccttgaggaaatggaggggaagacagtccctggaatactgatcaggggtcccctttgaccactttgaccactgcagcagctgtggtcaggctgctgacctttctctcaggccttgttctctgcctcacgctcaatgtgtttaaaggtttgattccaacttttctgagtccttcggcctccactcaggtcaggaccagaagtcgctgttcctccctcagagactagaactttccaatgaataggagattatcccaggtgcctgtgtccaggctggcgtctgggttctgtgcccccttccccaccccaggtgtcctgtccattctcaggatggtcacatgggcactgttggagtgtcgcaagagagatacaaagtgtctgaattttctgactcttcccgtcagaacacccaaagacacacgtgacccaccatcccgtctctgaccatgaggccaccctgaggtgctgggccctgggcttctaccctgcggagatcacactgacctggcagcgggatggcgaggaccaaactcaggacaccgagcttgtggagaccaggccagcaggagatggaaccttccagaagtgggcagctgtggtggtgccttctggagaagagcagagatacacgtgccatgtgcagcacgaggggctgccagagcccctcaccctgagatggggtaaggagggggatgaggggtcatgtgtcttctcagggaaagcagaagtcctggagcccttcagccgggtcagggctgaggcttgggggtcagggcccctcaccttcccctcctttcccagggccatcttcccagcccaccatccccatcgtgggcatcgttgctggcctggctgtcctggctgtcctagctgtcctaggagctgtgatggctgttgtgatgtgtaggaggaagagctcaggtagggaaggggtgaggagtggggtctgggttttcttgtcccactgggagtttcaagccccaggtagaagtgtgccccacctcgttactggaagcaccatccacacatgggccatcccagcctgggaccctgtgtgctagcacttactctgttgtgaagcacatgacaatgaaggacagatgtatcaccttgatgattatggtgttggggtccttgattccagcattcatgagtcaggggaaggtccctgctaaggacagaccttaggagggcagttgctccagaacccacagctgctttccccgtgtttcctgatcctgccctgggtctgcagtcatagttctggaaacttctcttgggtccaagactaggaggttcccctaagatcgcatggccctgcctcctccctgtcccctcacagggcattttcttcccacaggtggaaaaggagggagctgctctcaggctgcgtgtaagtgatggcggtgggcgtgtggaggagctcacccaccccataattcctcttgtcccacatctcctgcgggctctgaccaggtctttttttttgttctaccccagccagcaacagtgcccagggctctgatgagtctctcatcgcttgtaaaggtgagattctggggagctgaagtggtcgggggtggggcagagggaaaaggcctaggtaatggggatcctttgattgggacgtttcgaatgtgtggtgagctgttcagagtgtcatcacttaccatgactgacctgaatttgttcatgactattgtgttctgtagcctgagacagctgcctgtgtgggactgagatgcaggatttcttcacacctttcctttgtgacttcaagagcctctggcatctctttctgcaaaggcatctgaatgtgtctgcgttcctgttagcataatgtgaggaggtggagagacagcccacccccgtgtccaccgtgacccctgtccccacactgacctgtgttccctccccgatcatctttcctgttccagagaagtgggctggatgtctccatctctgtctcaactttacgtgtactgagctgcaacttcttacttccctactgaaaataagaatctgaatataaatttgttttctcaaatatttgctatgagaggttgatggattaattaaataagtcaattcctggaagttgagagagcaaataaagacctgagaaccttccagaatccgca

SEQ ID NO: 352 - DNA, 3357 bp, Homo sapiens
ccggggtcccagttctaaagtccccacgcacccacccggactcagaatctcctcagacgccgagatgcgggtcacggcgccccgaaccctcctcctgctgctctggggggcagtggccctgaccgagacctgggccggtgagtgcggggtcgggagggaaatggcctctgtggggaggagagaggggaccgcaggcgggggcgcaggacccggggagccgcgccgggaggagggtcgggcgggtctcagcccctcctcgcccccaggctcccactccatgaggtatttctacaccgccatgtcccggcccggccgcggggagccccgcttcatcaccgtgggctacgtggacgacacgctgttcgtgaggttcgacagcgacgccacgagtccgaggaaggagccgcgggcgccatggatagagcaggaggggccggagtattgggaccgggagacacagatctccaagaccaacacacagacttaccgagagaacctgcgcaccgcgctccgctactacaaccagagcgaggccggtgagtgaccccggcccggggcgcaggtcacgactccccatcccccacgtacggcccgggtcgccccgagtctccgggtccgagatccgcccccgaggccgcgggacccgcccagaccctcgaccggcgagagccccaggcgcgtttacccggtttcattttcagttgaggccaaaatccccgcgggttggtcggggcggggcggggctcgggggacggggctgaccgcggggccggggccagggtctcacatcatccagaggatgtacggctgcgacgtggggccggacgggcgcctcctccgcgggtatgaccaggacgcctacgacggcaaggattacatcgccctgaacgaggacctgagctcctggaccgcggcggacaccgcggctcagatcacccagcgcaagtgggaggcggcccgtgtggcggagcagctgagagcctacctggagggcctgtgcgtggagtcgctccgcagatacctggagaacgggaaggagacgctgcagcgcgcgggtaccaggggcagtggggagccttccccatctcctataggtcgccggggatggcctcccacgagaagaggaggaaaatgggatcagcgctagaatgtcgccctcccttgaatggagaatggcatgagttttcctgagtttcctctgagggccccctcttctctctaggacaattaagggatgacgtctctgaggaaatggaggggaagacagtccctagaatactgatcaggggtcccctttgacccctgcagcagccttgggaaccgtgacttttcctctcaggccttgttctctgcctcacactcagtgtgtttggggctctgattccagcacttctgagtcactttacctccactcagatcaggagcagaagtccctgttccccgctcagagactcgaactttccaatgaataggagattatcccaggtgcctgcgtccaggctggtgtctgggttctgtgccccttccccaccccaggtgtcctgtccattctcaggctggtcacatgggtggtcctagggtgtcccatgagagatgcaaagcgcctgaattttctgactcttcccatcagaccccccaaagacacatgtgacccaccaccccatctctgaccatgaggtcaccctgaggtgctgggccctgggcttctaccctgcggagatcacactgacctggcagcgggatggcgaggaccaaactcaggacaccgagcttgtggagaccagaccagcaggagatagaaccttccagaagtgggcagctgtggtggtgccttctggagaagagcagagatacacatgccatgtacagcatgaggggctgccgaagcccctcaccctgagatggggtaaggagggggatgaggggtcatatctcttctcagggaaagcaggagcccttcagcagggtcagggcccctcatcttcccttcctttcccagagccgtcttcccagtccaccgtccccatcgtgggcattgttgctggcctggctgtcctagcagttgtggtcatcggagctgtggtcgctgctgtgatgtgtaggaggaagagctcaggtagggaaggggtgaggggtggggtctgggttttcttgtcccactgggggtttcaagccccaggtagaagtgttccctgcctcattactgggaagcagcatccacacaggggctaacgcagcctgggaccctgtgtgccagcacttactcttttgtgcagcacatgtgacaatgaaggacggatgtatcaccttggtggttgtggtgttggggtcctgattccagcattcatgagtcaggggaaggtccctgctaaggacagaccttaggagggcagttggtccaggacccacacttgctttcctcgtgtttcctgatcctgccttgggtctgtagtcatacttctggaaattccttttgggtccaagacgaggaggttcctctaagatctcatggccctgcttcctcccagtcccctcacagggcattttcttcccacaggtggaaaaggagggagctactctcaggctgcgtgtaagtgatgggggcgggagtgtggaggagctcacccaccccataattcctcctgtcccacgtctcctgcgggctctgaccaggtcctgtttttgttctactccaggcagcgacagtgcccagggctctgatgtgtctctcacagcttgaaaaggtgagattcttggggtctagagtgggtggggtggcaggtctgggggtgggtggggcagtggggaaaggcctgggtaatggagattctttgattgggatgtttcgcgtgtgtggtgggctgtttagagtgtcatcacttaccatgactaaccagaatttgttcatgactgttgttttctgtagcctgagacagctgtcttgtgagggactgagatgcaggatttcttcacgcctcccctttgtgacttcaagagcctctggcatctctttctgcaaaggcacctgaatgtgtctgcgtccctgttagcataatgtgaggaggtggagagacagcccacccccgtgtccaccgtgacccctgttcccatgctgacttgtgtttcctccccagtcatctttcctgttccagagaggtggggctggatgtctccatctctgtctcaactttatgtgcactgagctgcaacttcttacttccctactgaaaataagaatctgaatataaatttgttttctcaaatatttgctatgagaggttgatggattaattaaataagtcaattcctggaatttgagagagcaaataaagacctgagaaccttccagaatctgca

SEQ ID NO: 353 - DNA, 3357 bp, Homo sapiens
ccgcggtcccagttctaaagtccccacgcacccacccggactcagagtctcctcagacgccgagatgctggtcatggcgccccgaaccgtcctcctgctgctctcggcggccctggccctgaccgagacctgggccggtgagtgcgggtcgggagggaaatggcctctgccgggaggagcgaggggaccgcaggcgggggcgcaggacctgaggagccgcgccgggaggagggtcgggcgggtctcagcccctcctcacccccaggctcccactccatgaggtatttctacacctccgtgtcccggcccggccgcggggagccccgcttcatctcagtgggctacgtggacgacacccagttcgtgaggttcgacagcgacgccgcgagtccgagagaggagccgcgggcgccgtggatagagcaggaggggccggagtattgggaccggaacacacagatctacaaggcccaggcacagactgaccgagagagcctgcggaacctgcgcggctactacaaccagagcgaggccggtgagtgaccccggcccggggcgcaggtcacgactccccatcccccacgtacggcccgggtcgccccgagtctccgggtccgagatccgcctccctgaggccgcgggacccgcccagaccctcgaccggcgagagccccaggcgcgtttacccggtttcattttcagttgaggccaaaatccccgcgggttggtcggggcggggcggggctcgggggactgggctgaccgcggggccggggccagggtctcacaccctccagagcatgtacggctgcgacgtggggccggacgggcgcctcctccgcgggcatgaccagtacgcctacgacggcaaggattacatcgccctgaacgaggacctgcgctcctggaccgccgcggacacggcggctcagatcacccagcgcaagtgggaggcggcccgtgaggcggagcagcggagagcctacctggagggcgagtgcgtggagtggctccgcagatacctggagaacgggaaggacaagctggagcgcgctggtaccaggggcagtggggagccttccccatctcctataggtcgccggggatggcctcccacgagaagaggaggaaaatgggatcagcgctagaatgtcgccctccgttgaatggagaatggcatgagttttcctgagtttcctctgagggccccctcttctctctagacaattaaggaatgacgtctctgaggaaatggaggggaagacagtccctagaatactgatcaggggtcccctttgacccctgcagcagccttgggaaccgtgacttttcctctcaggccttgttctctgcctcacactcagtgtgtttggggctctgattccagcacttctgagtcactttacctccactcagatcaggagcagaagtccctgttccccgctcagagactcgaactttccaatgaataggagattatcccaggtgcctgcgtccaggctggtgtctgggttctgtgccccttccccaccccaggtgtcctgtccattctcaggctggtcacatgggtggtcctagggtgtcccatgaaagatgcaaagcgcctgaattttctgactcttcccatcagaccccccaaagacacacgtgacccaccaccccatctctgaccatgaggccaccctgaggtgctgggccctgggtttctaccctgcggagatcacactgacctggcagcgggatggcgaggaccaaactcaggacactgagcttgtggagaccagaccagcaggagatagaaccttccagaagtgggcagctgtggtggtgccttctggagaagagcagagatacacatgccatgtacagcatgaggggctgccgaagcccctcaccctgagatggggtaaggagggggatgaggggtcatatctcttctcagggaaagcaggagcccttcagcagggtcagggcccctcatcttcccctcctttcccagagccgtcttcccagtccaccgtccccatcgtgggcattgttgctggcctggctgtcctagcagttgtggtcatcggagctgtggtcgctgctgtgatgtgtaggaggaagagttcaggtagggaaggggtgaggggtggggtctgggttttcttgtcccactgggggtttcaagccccaggtagaagtgttccctgcctcattactgggaagcagcatgcacacaggggctaacgcagcctgggaccctgtgtgccagcacttactcttttgtgcagcacatgtgacaatgaaggatggatgtatcaccttgatggttgtggtgttggggtcctgattccagcattcatgagtcaggggaaggtccctgctaaggacagaccttaggagggcagttggtccaggacccacacttgctttcctcgtgtttcctgatcctgccctgggtctgtagtcatacttctggaaattccttttgggtccaagactaggaggttcctctaagatctcatggccctgcttcctcccagtgccctcacaggacattttcttcccacaggtggaaaaggagggagctactctcaggctgcgtgtaagtggtgggggtgggagtgtggaggagctcacccaccccataattcctcctgtcccacgtctcctgcgggctctgaccaggtcctgtttttgttctactccaggcagcgacagtgcccagggctctgatgtgtctctcacagcttgaaaaggtgagattcttggggtctagagtgggtggggtggcgggtctgggggtgggtggggcagaggggaaaggcctgggtaatggggattctttgattgggatgtttcgcgtgtgtggtgggctgtttagagtgtcatcgcttaccatgactaaccagaatttgttcatgactgttgttttctgtagcctgagacagctgtcttgtgagggactgagatgcaggatttcttcacgcctcccctttgtgacttcaagagcctctggcatctctttctgcaaaggcacctgaatgtgtctgcgtccctgttagcataatgtgaggaggtggagagacagcccacccttgtgtccactgtgacccctgttcccatgctgacctgtgtttcctccccagtcatctttcttgttccagagaggtggggctggatgtctccatctctgtctcaactttacgtgcactgagctgcaacttcttacttccctactgaaaataagaatctgaatataaatttgttttctcaaatatttgctatgagaggttgatggattaattaaataagtcaattcctggaatttgagagagcaaataaagacctgagaaccttccagaatctgca

SEQ ID NO: 354 - DNA, 351 bp, Homo sapiens
gggttctttgcattcggtatttaataccttttgtgtgactgccttaaaactaatggcctccttatgattttttttaaaaaaggggttacaaaaatatcaagtgtccaaataaaatatgcacactgcttagatgtgcatagttccggaaaacgggcagtgctggagcgctggtgaagagcattgggactgcattgagccctcgcaactttgaggtgatgactacaggctcccggttgcaatagacagtaacaaaccctgcttctttgtattcaggagatgttctggactcacacaaggaaactcgggctagagaatgaggataactttaaatgcaacaacccagagtcacag

SEQ ID NO: 355 - DNA, 7661 bp, Homo sapiens
aacaggaagcggcccctcccggcttcggagccgccggtaagtcgtccagcggagccggctgcgagccccgcggccgggtggggtgaggtggggtgcgcttccggggaaacgcagctgcggtcgctcgggaaccacgcctggcaggtcaggcaggtcttccctcagcccagccctgctcacgccgcgtccggactttgccgtccagtgtcggggacccccaccgctgccgcccgcggtccagctccctctccatcctttcagaccgctccacccctctcacagcctttgtcctggcgtttccaggctgggtcgctcctttctcccctttcgccgaggtcttcctccttccaccctccacccccaagaaagatctttgcccttccgtcatgagattccgtctgccctcgtccgggccacccgcagcgggaggctttcatctcctgtctcggcgcggcgggctgggaacggaggggcagctggatggtggaggggcctgagcctcagggacctgcccccactgctgccattcaccctccctaacgctgccgtggacacccgcctcctccataccctctgataccttctgggccccgcgtgagaaaccccctcgggcacccttcaggtggcgtgggagggggcgacaaagcgaggctttgtctccggagattcctgggagagcgcgcccgggcgcacagggggcggggcggggtaggggtcgatcagggaggggggaacctgggaggggcgcacccggctgcggtcgacccccagccctacccacggccccctggagtagggcacattcacagaggaagtgttttgaccacagtgcgtcagaaatagacccaggcctccgttccccagtcagtcgcaacatcctcccgccgtttgttgaggcagtttggtggagggaagtggaacctacgcggacagaggctgtttctctgtcaggaggcaagcacgagtgctgaggaaaactttgcccttgccatgagacacttctcagacacagcgtggcactgaggccatcaaggggcgccggcacagggacgcttggagggagatggggcaggatgtatgctcagcagctggggttgtgggtatcagatctgtccctgtgttgcatgcaaaggcagctctgtcctctccacatctaagaaatccccgcacaccctgattccaaggcctaaggaaggcaggctaagaattcctaccccagggcttggagatccctggacagggaggctgaactggaggctcccctggtgtcccatgtgccctctgtgcccaagactaatgtttttcacttccaaatttggcaaatttcacttggagtggactggatagcagctgtctctggagcagatgctggcaggggaatgggctgggaggagcagagccaatcactggtgaatcccgagctccctggggacaccagcctgctctcttcgcctccccttcctttttatttcttctgttctccagcctcttccccttctttttccacctctccagccactcatctctgcccagctgctgccctccccaggaggcctccatggcttcacctacctccaccaacccagcgcatgcccactttgagagcttcctgcaggcccagctgtgccaggacgtgctgagcagcttccaggagctgtgtggggccctggggctggaacccggtggggggctgccccagtaccacaagatcaaggaccagctcaactactggagcgccaagtcactgtggaccaagctggacaagcgagcaggccagcctgtctaccagcagggccgggcctgcaccagcaccaaggtggatacacggtgcctgggatggggtgtggagcatgcggggagtcagaggacggacaggatgccatgccctcactgccctgtgtgttcacagtgcctggtggtgggtgctggaccttgcgggctgcgggtcgctgtggagctggcgctgctgggggcccgagtggtgctggtggaaaagcgcaccaagttctctcgccacaacgtgctccacctctggcccttcaccatccacgacctgcgggcactcggtgctaagaagttctacgggcgcttctgcaccggcaccctggaccacatcagtgagcaccacgtggtggcctggaggggcgggtgagcttgggcctagaggcaggccagtggggaaatgctgggacagccaaatgtcgaagtggacaagatccgtatcagccaggtgaccttgaagattcaggtcccccatctataagtgggcttttgggctgagtgattgctaaggccttttccagtctgaccctgaccaggcacacactggtacatggggagcttgtgctgccctagggtccctgttcctaatgtcctctcccttccaggcatcaggcagctccagctgcttctgctgaaggtagcattgctgctgggggtggaaattcactggggtgtcactttcactggcctccagccccctcctaggaagggtaagtatttctatgctccctggaatctccccctcccccatcaagaacttggccagtgtctgaaaaaggatgggccaggagtgtccttttctgtttttgttttgagacagagtctcgttctgtcacccaggctggagtgcagtggcatgatctcggctcactgcaacctctgccacccagtttcaagtgattctcctgcctcagcctcctgaggagctgggattacaggcatgtgccaccatgcccagctaatttttgtatttttttaagtagagacggggtttcactgtgttggccaggctggtctcgaactactgacctcaagtgatccacccacctcggtctcccaaagtgctgggattacaggcgtgacccaccatgccagccaggagtctccttttctaatagtgtggccttgggcaagccactctgagcctcagattgagcatttgcaaaacaagaataacacttccttcctcacctgccttccatagctgctgtgaaggtgtaatctgatagataatatatcattgctttctaaaccagagagtcctttacacgttttgatgatttcactggtttgtcctgagagtataggggctcttacgacttctacacctttgtgcctctcataccccctgccctagggagtggctggcgtgcccagctccaacccaacccccctgcccagctggccaactatgaatttgacgtccttatctcggctgcaggaggtaaattcgtccctgaaggtgagtgatcacttccctcaaagaagccagcatctctggcacatcctgggcctttctagattgttataaccccctcctcctgccattgttcacctaccgccacctctaggcttcaaagttcgagaaatgcgaggcaaactggccattggcatcacagccaactttgtgaatggacgcaccgtggaggagacacaggtgccggagatcagtggtgtagccaggatctacaaccagagcttcttccagagccttctcaaagccacaggtcagggaccctcttgctgaatttcccctccccctgcctgactgtggcctggctcctgcctctcccttccaaacttgtcctcactgcaaggaactccacacttttctgtttttttggtctcagcagcaaaggagaaggaacctgtcccctcagggattaagcaagcacagccctagttgatcacccagcatgaaaagtcctggaatctctcagagatgaacctgtgtatgggagttttgcttaagtggtacttcaagaaggtgcctctgtttactttggttttgcactgccatgcgaccaggtggtgcaggtctcccaaatgccacccccctccaagcttccctctttgctctaagtcctcaggcctcctgggcctgggacagatggttgtttgtgtcatcaggactcgtggggttctatgcgtggagcactcaccgcagcctaagctgggatcccagctcagaggtcaggccatgttgggatgtttagggaaggtgatgcattatcaggagacatatctactgtcccctgccctgtacccccaggcattgatctggagaacattgtgtactacaaggacgacacccactactttgtgatgacagccaagaagcagtgcctgctgcggctgggggtgctgcgccaggtgaggcccagtcctggccaggagaggctgggtggtgagccccgggaggcagaggctaggcttggacatagtcgacacctgggtgtggggaccccgtcctctcctgcctttgtcctggcattaacttcacctctaaaagttctcttggccaggcatggtggctcatgcctgtaatcccagcactttgggaagccgaggtgggtggatcacctgaggtcaggagttcaagaccagcctggccaacatggtgaaaccccgtctctactaaaagtacaaaaattagctgggcttgttggcgggcgcctgtaatcccagctactagggaggctgaggcaggagaatcatttgaacctgggaggcggaagttgcagtgagccaagattgtgccactgcactccagcctcggcaacaaagtgaaactctgtctcaaaaaaaaaaaaaaaaaaagttctcccctgggatttacaaggcagcaggaatcatattctgggctaaacaccttataccagccacagtagatgtgtgtcagctccatgagggcaggcatttctgtctctttgtctgttgcttgctgctaattgccagtacctggaacagtgccaaatacatagtaagcgctcggtatgtatttgctgaatgaatgaactagttgagtgcctaccatgtgctagatactgtgttgagagttaaatttgcatctcccatctaattctcatgagtaccctgataaattaggcatgttgtctctaagtgatggacaaactaaagctcttgagtttgtggcaagtatatgacagtaatgatatgggcagaacagagcctgggacacccagcagcagggtgaatgttgaagaaagggctttgagaattccaggctgctggaattctagtcccagctcagccttcaactgctgtgtagtctagggcagccccttccttctctgggccccaggatgtgcaccttctgcgcccaagggggtggcactggcccactgaccctgctctcagaggtctctgaggttctgctctgttgaccatacaggactggccagacaccaatcggctgctgggcagtgccaatgtggtgcccgaggctctgcagcgctttacccgggcagctgctgactttgccacccatggcaagctcgggaaactagagtttgcccaggatgcccatgggcagcctgatgtctctgcctttgacttcacgagcatgatgcgggcagagagttctgctcgtgtgcaagagaagcatggcgcccgcctgctgctgggactggtgggggactgcctggtggaggtgaggggttcaggaggcacaggggtttcatggttaggggagggagctgcctagtatggaggaggggataaaaaggtctgcctgcagaggggaggagctaaaggctgcctggtgtggggatggccccttctgctgtgacctgggtggatatctgggcttgggatgcacctgttggattctccctgagctgcttcctattcctctgacactgcagcccttctggcccctgggcactggagtggcacggggcttcctggcagcctttgatgcagcctggatggtgaagcggtgggcagagggcgctgagtccctagaggtgttggctgagcggtaagacctgagttgaggaggatgtgggcagggcaggacatgtgacaaggttcaggaagaggggcaggggtgctgagtgaatagacggaggaataggcagaagaaaaggcctggcagttcctgagaggtgggtgctgacaggtgccctcccattcatgcccctgccccttaccctcaccccctcagtgagagcctgtaccagcttctgtcacagacatccccagaaaacatgcatcgcaatgtggcccagtatgggctggacccagccacccgctaccccaacctgaacctccgggcagtgacccccaatcaggtcagacccccgacacacccaccagccttcccaagccaacccccttcccccaggtcaggccctccctgcccagtcgctgccctttggggtcaatcctacccccggcaggcccttacccctggactcaggggctgtgtggccagcctgccttgagacctgagcggggctgccttaggtacgagacctgtatgatgtgctagccaaggagcctgtgcagaggaacaacgacaagacagatacagggatgccagccaccggtgagcaggccttcctcccaaggggtgaccaaaatatgtactacccagcgaggcccaggtggtccctgcaaagcagctgcagcctcaggacaggagcagcgtgccggagcactcattgttggctggtgggttggttgggggcctgctggaggaacggaggggcagcaccgcacaggcagcagttggctgccagtctgaatgtaagcgcgttagtgtttgaaccaccgttacagccatagtggtgctggcaacctcccctgcccccagtttagtctgctgccctctatgtggccagttgcgatttcactttattcactcctctactttattccaaagagattttttttaaaagagaattgggatggagagctgctgatagtcagctttaggctggtgccctagtagaggtgggtccctgactccttctccccctacagaacccccacatgcagcagctgggctccctatatgcctgggatgggcagaggggcccttgggcacagcacagccttctttcccagggtcggcaggcacccaggaggagctgctacgctggtgccaggagcagacagctgggtacccgggagtccacgtctccgatttgtcttcctcctgggctgatgggctagctctgtgtgccctggtgtaccggctgcagcctggcctgctgtgagtccctggcagacccacctctctctcatgatctcagtgtaggagttagcatatccagttgaatcctagagacagtgtgcttccctgcatctgccgacagtcttgtgagactctaatgcattcagatagtggagagctttgtgaatggcacaggcccccaaagccaggagtagtgtcactgggttgggcactgggtagcagagactacacacctaccttcaagccttcttgtaccccagctgctgcttgctgtccctcccctcctgctgcccttcctcccctcagtggggctaggttcttgtctctagttggcttttctccctgacatcccacagggaaccctcagagctgcaggggctgggagctctggaagcaactgcttgggcactaaaggtggcagagaatgagctgggcatcacaccggtggtgtctgcacaggccgtggtagcagggagtgacccactgggcctcattgcctacctcagccacttccacagtgccttcaagagcatggcccacagcccaggtgacctgaaggaaaggcgggcaggataactgggatggggaggtgtgtgtgtgtgtgtgtgtgtgtgtgacagagggagaaggcggtgtgtgtgtgtgtgtgtgtcag

SEQ ID NO: 356 - DNA, 11696 bp, Homo sapiens
aacaggaagcggcccctcccggcttcggagccgccggtaagtcgtccagcggagccggctgcgagccccgcggccgggtggggtgaggtggggtgcgcttccggggaaacgcagctgcggtcgctcgggaaccacgcctggcaggtcaggcaggtcttccctcagcccagccctgctcacgccgcgtccggactttgccgtccagtgtcggggacccccaccgctgccgcccgcggtccagctccctctccatcctttcagaccgctccacccctctcacagcctttgtcctggcgtttccaggctgggtcgctcctttctcccctttcgccgaggtcttcctccttccaccctccacccccaagaaagatctttgcccttccgtcatgagattccgtctgccctcgtccgggccacccgcagcgggaggctttcatctcctgtctcggcgcggcgggctgggaacggaggggcagctggatggtggaggggcctgagcctcagggacctgcccccactgctgccattcaccctccctaacgctgccgtggacacccgcctcctccataccctctgataccttctgggccccgcgtgagaaaccccctcgggcacccttcaggtggcgtgggagggggcgacaaagcgaggctttgtctccggagattcctgggagagcgcgcccgggcgcacagggggcggggcggggtaggggtcgatcagggaggggggaacctgggaggggcgcacccggctgcggtcgacccccagccctacccacggccccctggagtagggcacattcacagaggaagtgttttgaccacagtgcgtcagaaatagacccaggcctccgttccccagtcagtcgcaacatcctcccgccgtttgttgaggcagtttggtggagggaagtggaacctacgcggacagaggctgtttctctgtcaggaggcaagcacgagtgctgaggaaaactttgcccttgccatgagacacttctcagacacagcgtggcactgaggccatcaaggggcgccggcacagggacgcttggagggagatggggcaggatgtatgctcagcagctggggttgtgggtatcagatctgtccctgtgttgcatgcaaaggcagctctgtcctctccacatctaagaaatccccgcacaccctgattccaaggcctaaggaaggcaggctaagaattcctaccccagggcttggagatccctggacagggaggctgaactggaggctcccctggtgtcccatgtgccctctgtgcccaagactaatgtttttcacttccaaatttggcaaatttcacttggagtggactggatagcagctgtctctggagcagatgctggcaggggaatgggctgggaggagcagagccaatcactggtgaatcccgagctccctggggacaccagcctgctctcttcgcctccccttcctttttatttcttctgttctccagcctcttccccttctttttccacctctccagccactcatctctgcccagctgctgccctccccaggaggcctccatggcttcacctacctccaccaacccagcgcatgcccactttgagagcttcctgcaggcccagctgtgccaggacgtgctgagcagcttccaggagctgtgtggggccctggggctggaacccggtggggggctgccccagtaccacaagatcaaggaccagctcaactactggagcgccaagtcactgtggaccaagctggacaagcgagcaggccagcctgtctaccagcagggccgggcctgcaccagcaccaaggtggatacacggtgcctgggatggggtgtggagcatgcggggagtcagaggacggacaggatgccatgccctcactgccctgtgtgttcacagtgcctggtggtgggtgctggaccttgcgggctgcgggtcgctgtggagctggcgctgctgggggcccgagtggtgctggtggaaaagcgcaccaagttctctcgccacaacgtgctccacctctggcccttcaccatccacgacctgcgggcactcggtgctaagaagttctacgggcgcttctgcaccggcaccctggaccacatcagtgagcaccacgtggtggcctggaggggcgggtgagcttgggcctagaggcaggccagtggggaaatgctgggacagccaaatgtcgaagtggacaagatccgtatcagccaggtgaccttgaagattcaggtcccccatctataagtgggcttttgggctgagtgattgctaaggccttttccagtctgaccctgaccaggcacacactggtacatggggagcttgtgctgccctagggtccctgttcctaatgtcctctcccttccaggcatcaggcagctccagctgcttctgctgaaggtagcattgctgctgggggtggaaattcactggggtgtcactttcactggcctccagccccctcctaggaagggtaagtatttctatgctccctggaatctccccctcccccatcaagaacttggccagtgtctgaaaaaggatgggccaggagtgtccttttctgtttttgttttgagacagagtctcgttctgtcacccaggctggagtgcagtggcatgatctcggctcactgcaacctctgccacccagtttcaagtgattctcctgcctcagcctcctgaggagctgggattacaggcatgtgccaccatgcccagctaatttttgtatttttttaagtagagacggggtttcactgtgttggccaggctggtctcgaactactgacctcaagtgatccacccacctcggtctcccaaagtgctgggattacaggcgtgacccaccatgccagccaggagtctccttttctaatagtgtggccttgggcaagccactctgagcctcagattgagcatttgcaaaacaagaataacacttccttcctcacctgccttccatagctgctgtgaaggtgtaatctgatagataatatatcattgctttctaaaccagagagtcctttacacgttttgatgatttcactggtttgtcctgagagtataggggctcttacgacttctacacctttgtgcctctcataccccctgccctagggagtggctggcgtgcccagctccaacccaacccccctgcccagctggccaactatgaatttgacgtccttatctcggctgcaggaggtaaattcgtccctgaaggtgagtgatcacttccctcaaagaagccagcatctctggcacatcctgggcctttctagattgttataaccccctcctcctgccattgttcacctaccgccacctctaggcttcaaagttcgagaaatgcgaggcaaactggccattggcatcacagccaactttgtgaatggacgcaccgtggaggagacacaggtgccggagatcagtggtgtagccaggatctacaaccagagcttcttccagagccttctcaaagccacaggtcagggaccctcttgctgaatttcccctccccctgcctgactgtggcctggctcctgcctctcccttccaaacttgtcctcactgcaaggaactccacacttttctgtttttttggtctcagcagcaaaggagaaggaacctgtcccctcagggattaagcaagcacagccctagttgatcacccagcatgaaaagtcctggaatctctcagagatgaacctgtgtatgggagttttgcttaagtggtacttcaagaaggtgcctctgtttactttggttttgcactgccatgcgaccaggtggtgcaggtctcccaaatgccacccccctccaagcttccctctttgctctaagtcctcaggcctcctgggcctgggacagatggttgtttgtgtcatcaggactcgtggggttctatgcgtggagcactcaccgcagcctaagctgggatcccagctcagaggtcaggccatgttgggatgtttagggaaggtgatgcattatcaggagacatatctactgtcccctgccctgtacccccaggcattgatctggagaacattgtgtactacaaggacgacacccactactttgtgatgacagccaagaagcagtgcctgctgcggctgggggtgctgcgccaggtgaggcccagtcctggccaggagaggctgggtggtgagccccgggaggcagaggctaggcttggacatagtcgacacctgggtgtggggaccccgtcctctcctgcctttgtcctggcattaacttcacctctaaaagttctcttggccaggcatggtggctcatgcctgtaatcccagcactttgggaagccgaggtgggtggatcacctgaggtcaggagttcaagaccagcctggccaacatggtgaaaccccgtctctactaaaagtacaaaaattagctgggcttgttggcgggcgcctgtaatcccagctactagggaggctgaggcaggagaatcatttgaacctgggaggcggaagttgcagtgagccaagattgtgccactgcactccagcctcggcaacaaagtgaaactctgtctcaaaaaaaaaaaaaaaaaaagttctcccctgggatttacaaggcagcaggaatcatattctgggctaaacaccttataccagccacagtagatgtgtgtcagctccatgagggcaggcatttctgtctctttgtctgttgcttgctgctaattgccagtacctggaacagtgccaaatacatagtaagcgctcggtatgtatttgctgaatgaatgaactagttgagtgcctaccatgtgctagatactgtgttgagagttaaatttgcatctcccatctaattctcatgagtaccctgataaattaggcatgttgtctctaagtgatggacaaactaaagctcttgagtttgtggcaagtatatgacagtaatgatatgggcagaacagagcctgggacacccagcagcagggtgaatgttgaagaaagggctttgagaattccaggctgctggaattctagtcccagctcagccttcaactgctgtgtagtctagggcagccccttccttctctgggccccaggatgtgcaccttctgcgcccaagggggtggcactggcccactgaccctgctctcagaggtctctgaggttctgctctgttgaccatacaggactggccagacaccaatcggctgctgggcagtgccaatgtggtgcccgaggctctgcagcgctttacccgggcagctgctgactttgccacccatggcaagctcgggaaactagagtttgcccaggatgcccatgggcagcctgatgtctctgcctttgacttcacgagcatgatgcgggcagagagttctgctcgtgtgcaagagaagcatggcgcccgcctgctgctgggactggtgggggactgcctggtggaggtgaggggttcaggaggcacaggggtttcatggttaggggagggagctgcctagtatggaggaggggataaaaaggtctgcctgcagaggggaggagctaagggctgcctggtgtggggatggccccttctgctgtgacctgggtggatatctgggcttgggatgcacctgttggattctccctgagctgcttcctattcctctgacactgcagcccttctggcccctgggcactggagtggcacggggcttcctggcagcctttgatgcagcctggatggtgaagcggtgggcagagggcgctgagtccctagaggtgttggctgagcggtaagacctgagttgaggaggatgtgggcagggcaggacatgtgacaaggttcaggaagaggggcaggggtgctgagtgaatagacggaggaataggcagaagaaaaggcctggcagttcctgagaggtgggtgctgacaggtgccctcccattcatgcccctgccccttaccctcaccccctcagtgagagcctgtaccagcttctgtcacagacatccccagaaaacatgcatcgcaatgtggcccagtatgggctggacccagccacccgctaccccaacctgaacctccgggcagtgacccccaatcaggtcagacccccgacacacccaccagccttcccaagccaacccccttcccccaggtcaggccctccctgcccagtcgctgccctttggggtcaatcctacccccggcaggcccttacccctggactcaggggctgtgtggccagcctgccttgagacctgagcggggctgccttaggtacgagacctgtatgatgtgctagccaaggagcctgtgcagaggaacaacgacaagacagatacagggatgccagccaccggtgagcaggccttcctcccaaggggtgaccaaaatatgtactacccagcgaggcccaggtggtccctgcaaagcagctgcagcctcaggacaggagcagcgtgccggagcactcattgttggctggtgggttggttgggggcctgctggaggaacggaggggcagcaccgcacaggcagcagttggctgccagtctgaatgtaagcgcgttagtgtttgaaccaccgttacagccatagtggtgctggcaacctcccctgcccccagtttagtctgctgccctctatgtggccagttgcgatttcactttattcactcctctactttattccaaagagattttttttaaaagagaattgggatggagagctgctgatagtcagctttaggctggtgccctagtagaggtgggtccctgactcctcctcccctacagaacccccacatgcagcagctgggctccctatatgcctgggatgggcagagggggccttgggcacagcacagccttctttcccagggtcggcaggcacccaggaggagctgctacgctggtgccaggagcagacagctgggtacccgggagtccacgtctccgatttgtcttcctcctgggctgatgggctagctctgtgtgccctggtgtaccggctgcagcctggcctgctgtgagtccctggcagacccacctctctctcatgatctcagtgtaggagttagcatatccagttgaatcctagagacagtgtgcttccctgcatctgccgacagtcttgtgagactctaatgcattcagatagtggagagctttgtgaatggcacaggcccccaaagccaggagtagtgtcactgggttgggcactgggtagcagagactacacacctaccttcaagccttcttgtaccccagctgctgcttgctgtccctcccctcctgctgcccttcctcccctcagtggggctaggttcttgtctctagttggcttttctccctgacatcccacagggaaccctcagagctgcaggggctgggagctctggaagcaactgcttgggcactaaaggtggcagagaatgagctgggcatcacaccggtggtgtctgcacaggccgtggtagcagggagtgacccactgggcctcattgcctacctcagccacttccacagtgccttcaagagcatggcccacagcccaggtgacctgaaggaaaggcgggcaggataactgggatggggaggtgtgtgtgtgtgtgtgtgtgtgtgtgacagagggagaaggcggtgtgtgtgtgtgtgtgtgtcagaaagaggaagaaggcgccctctgagggccagcctgggagaggtgtccttctgggttggagagtgactgtctgttctgagagtacagtattggcaccccccatccacactgatgccctggctctccccgcaggccctgtcagccaggcctccccagggacctccagtgctgtattattccttagtaaacttcagaggaccctgcagcgatcccgggccaaggtggagagtttaggcagggctggagctgagcagggaggagtgggcaggggggtacccagtggagatcctggggtgatggtgaggacattcagaaagtggggaggactgggacctcaaaacatcacacttagagctgttaggacttattgcaggaaaatgcagaggatgctggtggcaagaagctgcgcttggaggtgaatgcaggcaggggcgggtcggtctcctaccccacattttatcccctttcctggtactgtcttccctatttctcatcccatgtcttgttccccaccccaggtcctgtaacccccccatccagcctccctgcctagtctcactccccttcccttcagccccttgtgttcatctgtacgcatcccctcccagctggccctgcccctctaccctccctgcctgagcacttacctccttagatggaggccgagaccccaagtactgaggtgccacctgacccagagcctggtgtacccctgacacccccatcccaacaccaggaggtgagagccaggctttgtgtgcaggcagaggcccggggagggcagggcaggggcgtttcatgggagggaaagaactttggagctggccttggctccacctgaccctgtgtcctgggggtccacgcaggccggtgctggggacctgtgtgcactttgtggggaacacctctatgtcctggaacgcctctgtgtcaacggccatttcttccaccggagctgcttccgctgccatacctgtgaggccacactgtggccaggtggctacgagcagcacccaggagatggtgagtgggcctgggagacctccagagagactctgggcctggccctgcttgggggacacagagcttgaggtagagaggcacaggatggaaacaggctcaagatggcacttcgttctcctgagctcagggtcttctctgtcccctgcaaagctccagatgtgtggttctgaggaacaggaggctggcagaaattcacctgcaaatctgtcttgttttccccaccttccttcataaactgttgcgtgtctgggcactgggctgcccacaccaaatgcctcctcccctctctaccctttccaggacatttctactgcctccagcacctgccccagacagaccacaaagcggaaggcagcgatagaggccctgagagtccggtaaagactgaaggcgtgtatgtatattggggcatgggaagaggaagagggtctcgtcaaaccagcgctttgctgggggtaactgaatgtcgtcttctactagcatgtaagctctgtgaaggcagggatgcctgtctgcttacacttcttgttctctcaagtatctaaaacacagccagacactgtttgtaaatggttttaagtgaatgaatgccaaggctcacctttgctccgaaggggtggcctcaccccccgacctcactccacatggtggcttttccaggagctccccacaccaagtgagaatagcatgccaccaggcctctcaactcccacagcctcgcaggagggggccggtcctgttccagatcccagccagcccacccgtcggcagatccgcctctccagcccggagcgccagcggttgtcctcccttaaccttacccctgacccggaaatggagcctccacccaagcctccccgcagctgctccgccttggcccgccacgccctggagagcagctttgtgggctggggcctgccagtccagagccctcaaggtaacccatcctcacagatgtgctgacccagggtgggacagggtgggagcactggcttcctgcagaggaattctggggaatacagagggaagttgtggggatcccaggccgtggcagcctctcctctgctccattcttctcagttcctcccatgccccaacacatacattcagtctttaccagacttgcagggcctccgtcaccaccatgctctttgttgcctgactggggcaggcgctggaggcagtagaacgtctcagttcttcttctcagctcttgtggccatggagaaggaggaaaaagagagtcccttctccagtgaagaggaagaagaagatgtgcctttggactcagatgtggaacaggtgagtgggccagcgtgcagccacaaaacgctctccagcccactacaggagaaacctgcactggtccactgcacccttctcttggaatgtcttctcacttggcctgtcatatctctggcctctaccttttctaccagagcttaccccacttcagcacgggttattttctgcctttccaaacaacactcctatccaccagggggcccaggccctatccctgactggcctgaccctcctataggccctgcagacctttgccaagacctcaggcaccatgaataactacccaacatggcgtcggactctgctgcgccgtgcgaaggaggaggagatgaagaggttctgcaaggcccaggtgaagcccgggggttcccaaaattctgatggggtcaaagttctgagactgagatcagagttcctccagtgctctgttcttgagcaacctagagactcctggatattctgtcttgtacccctcagaccatccaacggcgactaaatgagattgaggctgccttgagggagctagaggccgagggcgtgaagctggagctggccttgaggcgccagagcagtgagtgacaagctaggacacccctctgccttctagcactgtgttcagctccacgctccagcccgtaggagtcccagtggctatgccacacagctaacacatacctgtgacacccggctctcctgtctcccctaagcctgtaactcctgtggtgctggctggaagcctcctgatcaccctacccatcttccttcttctcaggttccccagaacagcaaaagaaactatgggtaggacagctgctacagctcgttgacaagaaaaacagcctggtggctgaggaggccgagctcatgatcacgtaaggggaaggggatggtgacagtggcccatgggccaggctccagccccttgggcaccttagacagctctgcttctacaatccctgacctccacagggtgcaggaattgaatctggaggagaaacagtggcagctggaccaggagctacgaggctacatgaaccgggaaggtaggtgaaatgtggggagaagcagacacatcccagggatgtgtcatgcaagcctcatgatctcagatactgaccaagcaacatgatgctctagtctgtgtacctctgagacaattcaggaggaagccagaggagggggctccaaagccccttctcacttcagttcaatcagagctgcacagttggcttttgtataagatctccttcaaaaaaaatcgtgctgctcagtagtgctagaaaaccactggtgttggcaaccctcctaatttggcagcttaggaaacaaagcccgggttatagaaatcacataggctgggattaggttgtggccctcctgcttccctgcccagttccctgttctctaagctttgtctcctccttttagaaaacctaaagacagctgctgatcggcaggctgaggaccaggtcctgaggaagctggtggatttggtcaaccagagagatgccctcatccgcttccaggaggagcgcaggctcagcgagctggccttggggacaggggcccagggctagacgagggtgggccgtctgctttcgttcccacaaagaaagcacctcaccccagcacagtgccacccctgttcatctgggctgcctggcagagagccttgctgtttacaattaaaatgtttctgccacaaacag

SEQ ID NO: 357 - DNA, 11696 bp, Homo sapiens; identical to SEQ ID NO: 356

SEQ ID NO: 358 - DNA, 532 bp, Homo sapiens
ttatttatacctgggttttattagtgcttccagtgtaacagtatcacttcgtctaaacaagaaacagcatcttataatgccagcctttcatgcgtcattttgggtcaaccctggggtggtggagccgacagacctgggcccccaaacagctctgccacttgctgtgtgcagatcacagaacatctgtgactcagtttcctttttggtaaaatgggactgttgcaagcactgatgttgaggtaatactcataggatgacggtcaataaatgagacgatgttttttaatattaactagctaaaagactggacgcgtcccttcactttaggcgctgttccttatcgggaatacgacgaagctgatcccaaaggcctctccagcccttttcagcagacagtcccgtgggtcctcactctaaggcattctttgaagacttggtctctcttccacacacccctcccattccccatctcttagtggtggtctaacccgccccgccatccccttccctctcacttctcatatccatttgg

SEQ ID NO: 359 - DNA, 3160 bp, Homo sapiens
cactaaagggccaagctttattgttctttagttctgtccccctcctgctgccccaggagtagggctggctgaggctctgggcccagatcctgggcctcccttgcccttcctagcacatgctggagctcagcctgggccctatataagccattgacctcctgtacgtggaagaggtagaatgcacctgcccacagcaccagccctacactgggggtccagagcagtatggcagcttccccggcccctcctccagccgccaggacacacagcagtgccaggagaagcagccccaggccaatcacatagctagcgaaggtggcccaccagcgagcctgagccatgcccagacccagctccgtccaggcctcctttagcacacacatcaacggcgacctctctgctggtcctacaacagagcagggcagtggggcaggagagagtcaagagtggaagggctgcttcaagcggggcaagggccaaggaaagggtgggggtgactcaccgtgggtagagctggggttctgctgtggggggctgtgcctcacaaacagagtagccatcagggcttcatgatcagagaggggggtgcccctgtgagggtcaaagcctgtagtggtttcaaaactcttacaggagatgtaaaacccagaaactgcctaggaaaagtaagggccagagagaagcttatatatgagggcctcttcccagagaaccagctcccggctaccccactttccacccatcagtggtccaagactagactagctgagcaaaggatctacacaggttagtagacaaagagacacagcatatgaaagcatgttgaagggaggagcctgaccttgtaaagcacgtagtcaatgcggacaccaaagggaaatggcttcagctcctgctggctgacgtagcagttcttgggtaccattgtgttgccttcctcagagccctaagggaatcattggctcatgctaggatgtgggggagaaggagggagagaagctggggatataggtggggaagtaacaggcaagtcctcaccttgaagtcccgagtttcaagataggcatcatgaagccctgtccactccttcagcaggcagcagcccaggtcttctgggtgcatgttgaggtctccacacaacagaaccacgtctgccttcttggatgtgtggctgggggaaccaggttggtgaggcgggagttcttccatcaccagctcttccccatgactggggccttgttcaccctcagcccctgggtcccatcccacttcccatttcaagcccaggctcacacactggatgaactgggccaattcccaagcttgggccacacgatgtgctaggtagatgtccttctgtcgattgtattcggcatggagctgagcaagatagatgagatcacagcagataagactgagggtcccaggggtatgtctgaatcaagcctgtgtctgtcacttggcatggtgtttggtatacaatggataagccttgcccattgcttccttataagatcttgcccccacacctcatccccaggtatgagagctagagaagtaccatctctctgtcccaggactgggctgcatgtcccagccctaggcactgccagcttcactcacatgggtcacataggcgttgagcaccatgccacttagatggagcaccagcagccccacagccttcccactgaaccagtcaccatgatggatctgcaggcaggaggagatagaaactcagggcaccgccaccatctttctgcccatcccctgcagctctcagagggctgcctcctctaccttgtattactggaggtggggaagggaggtggaagaggtcaaaggtctgccttaccatgtaggggtagccattgagagtgtagatgtgctgggtaagctcctggattggatgtttggagaagacacagaggccactgccaatgattccgctgaaagccaagccctgcttaataaccagaaaaacagggagagacacccagccttcttcccctcccttgtcttccagctctgatcagctatttttttctttttctactgctgggactagccctagaaccaaggcgacagcctttggaggagtatagggcagccagaaaacaaagctgaaatgggctgaagtcataggaccttcttggttcacccttctccttctctcacatccagagggagaggaggctggaggagactggagagtgcaggcaggatagggaagggctggcagggccaagagcctcctgggatgacaacaggcttcaggccagtgggcttctcacctccggaagtggtgtgcagctgggtaggtaggtgacagcttctgtctcaggtactggaagtcctgctcactccacacctgagggaagcggtgaggatgcctgcttggtctttccccagtgggacggtctgtccctcctcccagcctgggttccgcaccgtgctgcacaatctcacctcctccagcaaagccaggtcgaagctctcctggttcagaaagtctcccaggcgcctcatgcggtcggcccggtgcttgctcaagtacggaatgcccctaaggaagggaagagcggggcaggggaggcgactgctgggaccaccggcgctggggccagatgtggactttggaggttcgggttttccctacaccctgagatcgtggggcgggatagggggaggaaggctgcatgggtgcgaacggaaggtggcccccagaccgcactccgcagacgcactcaccagcagttgaggttgaagatccgcagtcgcagggagaagttgggcttcatggttggggagctccaggggcgctaggcggctcgaactctccagcgacggccgcggtggggacgggggcggccggcggcgccttctccccagaccgttccttcttcgcaggcggcgcgcacaggtgggcaccaagcccgcgtggctcaggtcgggcccgactcccgcgttcccccggcaaccggccggctgttcccaatcaggcgggccgccaacccggaaaggcgatccgctgccgaaatccgggcgcccaggctcggtaagggccgcgcgctaggaccctgggggtccggagagcgcccccgggtgggcggctcccggttccttttcctccaagctcgtccccggcggtcgcggccgc

SEQ ID NO: 360 - DNA, 3160 bp, Homo sapiens; identical to SEQ ID NO: 359

SEQ ID NO: 361 - DNA, 532 bp, Homo sapiens; identical to SEQ ID NO: 358

SEQ ID NO: 362 - DNA, 532 bp, Homo sapiens; identical to SEQ ID NO: 358

SEQ ID NO: 363 - DNA, 4132 bp, Homo sapiens
tcccggtggtgagggcagtggagcacccagcaggccgccaacatgctctgtctgtgcctgtatgtgccggtcatcggggaagcccagaccgagttccagtactttgagtcgaaggggctccctgccgagctgaagtccattttcaagctcagtgtcttcatcccctcccaggaattctccacctaccgccagtggaagcaggtctgtggggtgaccgcgcggaagggagaggcgcattcaaccggtatttgttgagtgaatggctgagcatgcatgaaccatcccccactgagaggaaagaatgtctgaaatgtagcagttttttcccattgccatgcggctatggccggcacgtgtacgtcacaggagtgaccggttttcatgtgacttcccaggaaggctggaattccagcgaaggctgttgtgagaaatggactttcagaaaggaaattccttttgctggaatgaggggggtgttcctgagaagtacagagccagaaagggacctggggggcaggccagtagtgcatgggaggagaaggcagggaggcccaggagttgagggtgctgcgtggtggagctgcccgtccctggtgtgggggtgagggagcctcccgccttctcgactctcagacatcgctgtggaacagggcctgtgtctgccctgaaagtgaggaagccgagctgcagagtccggaggccccttgccacctcggcttctcggttaatcagtttccctgctacccccagtgcccactgtgcaccaagggggatttgcagatccaaggaaggagacagaaggaggcccaggccctgtgaggcagaagcaagcactttgagaatgcgttgaagccagctgcggtgagcacaccctctgctctgggtgtctgcgacagcacccaccccagggaggcatgtggctcaccctggcagcaggcggctgggtcccagagggctccatgcctgatgttcgcctcctgcctaaatggcttgtccactctatttccattcctgttagagatttggagcagtcaccctataggtgatttatgtcactcttgtctgagagcacagatgtccacaggaagttaaatgtaacctcagcagataaaatatgtacctgcatctgtcctacattccagccacgcccctcacattagccttttgatcgcgccaggtcatggggtatctgttcaggcctccctgcccctgacacctttggcagctgaggaatcacaaggcgctgtcagtagtgtgtctaagagagaggcgcggtggtgatcctttgaggacgcgagctagccagtgggccatccatttccaaaccccagctggctgtcagttgatttctcccagtgagaaatccggaggacacaggaagactataccatcttccttgggagattctcggtcccagttttgggttccggattcagggcgttgctgagttggggtgactcactttcatcccccatgttctgaaggttagccttgagggtggcggcaggatgtgcagggaggcggcttgggaggaccacggcccaacttgcatcccgcccaccacttccctagctgtctgaccttgtgtaaatgtttaggctctcggaactcctgtttccttctctgtaaaatgggggaaatgacatttcctacctcctagagctgtttgcgaggggggtaagtgggttgctagaagtaaagcatttggcacgccctgcggccggtgctaggtgctggggaaatgtgtgctctcgtggagctgtcccagttgccaaccattaacagctgctgaacaaagcccacctcctgggaggcgggggcggggggggttacttttggaacctcattgccaaggaacagtctctcaaagccttcttgggacactaaagtgcttttcagtgagtgagcgggagagccagggcagctctatcacctggcttccctgagagcagggactggcagtaccatcatacacatgcccttggctccttacacttccccggcctcgggtgctgtggcagagtctggctctgcccccgattttcacctgcccaccaaattattctcggaccaatgccagttttaggagagaaacagcgagctgcagagttcctgtcagaaactggactccatggccatccccaagtctcagcagggagcatgtgtggttgaagcctgggtccagggacccagggacggcgctgcagcgaagccaccctgctcaccctggctgtacggcacgcaggtcttcagactgagaaagtgcccagctgtccctgtcggcctctgtccggagggctcttcccaggctccttgtttcctctctgcttgagagggagacaagattggcccttgcctgggttctggccagcacctggggttctaggtggtggctctggcatgtaagtcgattgccatggtggctctgagagtggagcagaagcatcttgggtccttggggccagctctgctcgcaattagtgaagtcattgcctggggatggggccccacaagggacaaggaaaggctggtccaggagccaaaagacaaaatgttacctttcttttctagaaaattgtacaagctggagataaggaccttgatgggcagctagactttgaagaatttgtccattatctccaagatcatgagaagaagctgaggctggtgtttaagagtttggacaaaaagaatgatggtaagtgttgccttcagagctgtggccggtccagcctcgggcctccccgtgcgcctggctcctgctcacggcctctgttcttgcaggacgcattgacgcgcaggagatcatgcagtccctgcgggacttgggagtcaagatatctgaacagcaggcagaaaaaattctcaagaggtgagtgctcagccagcctctgtgtttggtttaagtgtgatgaagggaaggctctgagactaaccctccgatgccattccctgggctgaccctgaacttggccttctcgtggtttgaaaggatgaataagtaacccctgtgggaggccagcccctccccagggttgcaggcctgctttcattggaagaatcacagatcacctggaattttgcccatcggccagtggcccatgaagggaaaactaatttgggggtggttcaaataggtaaaaggccagcaaggagcacctgtgcgtgtggagggggcggggcggggcggggggctcacactgcagcctcgttcccaggtgaatttcttccccatgctggtaacttgcacttaacactttagtcagaggcgctgccccaaaagatagctccctggtgcggggcggctgccaggaaatctcatggaacagccctgggagttgccgtctgtcctggctggaccttccggaaaccctgcggtctgaacactggctggtcctcggggacagcagccctgggctcagctgctgtggcgggctcgtctcgtgccgtgctgtgcccctgtctctgggtgtgtgcttgcttcactaacatggctccgagcacttatgcgtgttgtttctgctctctcctccgcatcctttgtctgtctgtcagaatacgaacgggccatttctggggccctgtcacctagtaagtatccatgtcgctcatgactgcctcccttgacttccatgcctgatcagagcgggattcttgtgggccattatattgccattgttgtgctaagtggggtgtggagccccctgctctttctcctgggggcagaggcacctcgtgtggtttctgggcatccgaatgcctgcccttggctcactgggaggtggggggatgcagctggcggatgggcatgtgggcacgtgggcagcctcgcctctgtcttgcagcatggataaaaacggcacgatgaccattgactggaacgagtggagagactaccacctcctccaccccgtggaaaacatccccgagatcatcctctactggaagcattccacggtgagccccacgtgcccagggccctcatctgctcccagggacccttagcccagagtcacccagtcgtccccatcccagagtgcagctggggctttccagccacctcctcttccacaggagactgtcccctcttctgccagcccagtagagctgtccgcatgttccccatgttctg

SEQ ID NO: 364 - DNA, 14919 bp, Homo sapiens
cgcgtcggaactcggccgcgggacatccacggggcgcgagtgacacgcgggagggagagcagtgttctgctggagccgatgccaaaaaccatgcatttcttattcagattcattgttttcttttatctgtggggcctttttactgctcagagacaaaagaaagaggagagcaccgaagaagtgaaaatagaagttttgcatcgtccagaaaactgctctaagacaagcaagaagggagacctactaaatgcccattatgacggctacctggctaaagacggctcgaaattctactgcaggtaggaaatgctgcgagctgcccgtgcgtccagttgcacaaaatcttgcctgcctccaccaagcggaagcctcattggttggttggttggggttttattttttaacggtaaaagttgagccctttattcattaaaaaaaatcacattatatggcagtgtttctctaataaactgaatatttttatttaaagtattgaaaatgttgtggcaataaattatcaaaaatacgatacatccacacacacatcaaccaccaccattacccttgggacctccagaattaaatcaaggttctgcctataaggatgttcacatttttcccttgccagaagtattgagtctttacggaggaatacatggaataaagagatttaattctggccttcagaagcacgatttttataggttgtggccactttctatcaagaaaaacagttacttccctggtgacttctggtgggccctgctccctcattccacctggtgcctactctgatttaattgatggcttattactcagagggagaatcttttctttaccctgtaaagataggactgggaaaaacagttccatccatttagaataaaatagagaaatttaataagaatttatacaattttataatttaataagaatttaataaattatatcattagaatttaataagaaaatataccattttaaattactattaaaatgactttttgaggctaaaactgccctatcatttttttacaacaaacccagggagttaaatgagttctttgtacaagccatgcacctagttaggggctggagacccattaaaaagttaactgttgaatagtttttgtaaagataacaattttaaaaaatgagatggctgttaatgattaactttgggcaaatcatacttctttctggtgattatagggaagtttgagtcaaacaccccattaagggttttagaaagagtgattatatgggaatgatggttagagaggactccaattttaaatgcccagctgtattttcaagtttgatttcttgaaatcagtttacttaagtattgctttttgttatagccggacacaaaatgaaggccaccccaaatggtttgttcttggtgttgggcaagtcataaaaggcctagacattgctatgacagatatgtgccctggagaaaagcgaaaagtagttatacccccttcatttgcatacggaaaggaaggctatggtaagatgtttaattttaatttcttgttttagttatatttaaaaaatgattaatagatttctgggtatataggtctgaaagaattgaaagcacagtctcaaagaaatatttgtacagccatgctcatagcagccatgtacaatagacaagagatggaagcaagccacatgtccatacatagagaaatggataaacaaaatgaatacatgcatatatggaagccaggcacagtggctcatgcctgtaatcccaacactttgggaggccaaggtggtagaatcacttgaggccaggaccagcctgagcaacagcaagaccctgctctacaaaaaaaaaaaaaaaaaaaatgaaatggaatattattcagccttaaaaaggaagaaaattctgagacatgcaccaacatgtatcagccttgaggacattatgctaaatgaaataaaccagtcacaaaaagacaaatactgtataattccatttatgtgaggtacctggagtagtcaaattaatagagacaaagtagaagggtgattgccagaggctgaagtgagagggaaaaggggaattgttgaccaatgggtatagagtttcatttttgccagatgaagagttctggagattggttgcatggtagtgtaagcgtactttactgaacaacacacttgaaaattgttatgatggtaaattttatgttatgtgtattttaccacaattaaaaacaaaaaagtgaaataaaaaatgatagatgaaataaagagaacagtaaagcccaatgaccttaagctctatctagttcagtccagtcccttctttttgcttataaggataatatgacattgtttgaatatagatctctggccagagttctttcttctacattgtggcaacactcatgatgattatatatattctataagctctaccttaagcatttttatttgttttcagcatatgttattattacataaatatttataacacagatctttggtaagcagtaccaaagttaaattcataaaactcagaaactggaacatgtaggtttagagtaaaaggacaggacgggcacattgtaaaaggaacagctgagatataatgggctgtcagtcattattaccccaatacaggacaagccttcaaatgtgcaagaaatgatcttattctttcaatatcttgtcattttaaaaatcctacagcaaaaagatctgaaaacctaggtaaagcaaataagcgggaaaaatgtttgtaacatgtatgaagacttgctaaccaataatgaaaatgacatatccctagaaatgggccaaattcataaataagcacccactaacaaaaaactacaaatggcctttaagtctatgagaatacttaattttattcataaagagaaattaaaaatgagacatcatatttcactcatcagattagcaaacacaaaacaacttggcaaaagcatggaaaaaccagcattattgctgggaatggaaatcattcaacttctctatcaactgttatcaaaagtgaaaatgcaggcccgggtgtggtggctcatgcctgtaattccagcactttgggaggctgaagtgggcagatcacttcaggtcaggagttcgagaccagtctggccaatatggtgaaaccccgtctccactaaaaatacaaaaattagctgggtgtggtagagtgtgcctgtaatcccagctacttgggaggctgaggcaggagaatcgctcgaacctgggaggcagaggttgcagtgagccaagattgcgccactgcactccagcctgggcaacagagcgagactccatctcaaaaaaaaaagtgaaaatgcacgtgccttcttatccaatagttccatttccaggaatgtgcacaaaggtatatgtaaaagaacattcactgcaggcatttttgggtgggagggtggcaaaaggttggaaaccacctgcctatccatcaataggaaattagttaaataaattatagtatatctatacaatgaattactgtgtaaccagtaaaaagaatgaagtagagctatacttattaatatgttaaaaataaagtggaggccaggcatggtggcttcatgcctataatcccagcactttgagaggctaaggtgggaggatcacttgagcccaggagtctgaaagcagcctgggcaatgtagggagacacaatctctacagaaaattaaaaagttagccaggcgtggcggtatccgcctgtggtcccaactactcagggggctgagatgggaggatccctggagcctgggaggtcgaggctgcggtgagctgtgattgtgccactgcactccaatctgggcaacacagcaagaccctggctcaaaaaaaaaagtggacaagactatattccacttttgggatatatattgagcatcagtgccaggctttgttctaggcactgggcataaagcagtgaccaaagtagacactactcccaatcctctatgagctttcatttcagaggaggagtttcacatatgcatgtatctacacagaatacatctggaagaatatgcagtcatctgatgacattaagtgttcctgggaaggaggcctcagggtcaaggatgagaagatttcttttcactctaacattttgtaccatttgaaagttttataaggcatgtattaatttttccaaaattaaaattttaaattacaaaaattgcatgtagcagaacagagaagaaaatttttaaagcaggcaggaggatgggcagcctgataggctgtaccttgcatccttagttaggttcttgctccgtgttgctgcttgaaggctatacagaaagaatctttgcctccttaccctatttagagccactgctgactccaccggtttgaaatagtaaagattaattttccacaatgagatattggcattgctcccaaatatttcatggaagtggcatgccttctttgaggcagttgtcttagtcattaagagttctttccagcaaaatcggggcatcagtgccccacactggattggcgggtggtgggggggtgtcagtgctttgagtcagacccagtcaggcttaaaactcctaaagagacaatttccagataacttcagctttatttttaatgctttttgccaataatttgatcccatcagaacagctcccatggtaccataattcatatatcctgtttttatttgtataggaacctaggagaaagagaaggaaaattgaaaataaattaagtcaaatgcaatacttgtgctaaaaatgttgtcaaaagttgaggccacttctaggcaaaatgttggaggcagagtttgcctttcagtctctttctcattttcaaagttttcctttctgtcttgcgttgtgtcttcagatgcctccacattctgcctaccactagagcacccactctcctatctgcctagagcacacacatctgtcatcatcaggtgctcatccagggttcaccgccatcaggcaaaggaccacttagcttatctttttcataaactaatttatgcttagatatgaatgactacccaggctgcctaagctcttaataaatcagaaacttgctgcagagatatagaagtttgatgtgaaacaagttcatattcaattggaggtatctctaacaaacattaaagtgattaatctcactagtaataccaccagcaccctcattttacagagtaagaaactgaggcccaaaaaaagtgttaattggaccatagttaatactgaccttgcctgcgttacattaggcattgtaatccaataccttggattacattattttaaaagttgcagtgtagaccttaagtaactgtttaacaaacaacctcttgattaaataagcatttaaaagtaagttgttattaagacctaacattagctataactttattttaggtagtacttgaagaagtctttcttctgcaaaatatccttgtctcatgtcacagaacaaccctgcatgtcttgaaatgcatgtgacttgttagtgcttaaataacaatacatgcggtatgtatatattctttaccttaattcctacttctttgatctgcttctctaaatataagtaattccgtagcaaatgcatattttcctcatttttatactttagttttttttaaaaaaaaaaaaaaaacaagaaaaagaggtaattggcaatatatccttttttttttttttttttttgagatggagtcttgctctgtcacccagattggagcgcagtggtgtgattgatcttggctcactgcagcctctgcctcccgggttcaagctattctcctgcctcagcctccgaggagctgggattacaggcacacgccaccatgcctggctaatttttgtatttttagtagagatggggtttcgccatgttggccaggctggtctcgaactcctggccagccaggctgatctcgccctcctggccaggcgcagtggtataagccaaataagaattgcttgaacctgggaggcagaggttacagtgagccgagatcgcgccattgcactctagcctgggtgacagaggaagattcttgtctaaaaaaaaaaagtggtataagccactgcgcccggccaatattttctatgtttatagcaaaattgttcaaaaactgcatatgtacctacaatattttttcttaagaaattcaagttttgggctgggcacagtggcgtatagctgtaatcctagcactttgggaggccgaggtgggtggctcacctgaggctaggagttcaagaccagcctggccaacatagtgaaaccccgtatctactaaaaatacaaaaaatagctgggtgtggtggcttgtgcctgtaatcccagctacttgggaggctgaaacacaagaatcacttgaactcgggaggtggaggttgcagtgagccaagatcgcgacactgcactacagcctgggcaacagaacagattctgtctcaaaaaaaaaaaaaaacgaaaagaaaagaaatttgaatttgtgttttgagtttgccttgaattattgtcaggagacaataattctgtcataaggagataactggaaaaaataggaatgggttttataaaacaatcattgactcaatctctagctcttctactctaaagtcaggtaatatgtggtgcattaggttaggacttttatgttagtcatatgatgcatgggtagatctttctatgttttctctttgaaaactactaatctgctactccttttggctataactcacaaactcttttctcttcagactatataaagactttagctagaatgcttcacttttttattaaagaaattgctgtttccttccaaggacaaacattttaaaaataaatgatatgggtcattcattcggcaaatattggactgcctgtagtagattaggcactgtgtaggacactggcaatatactgatgacacaagctacccgctgccccttagcaagtcatttttgcaagtcacttttatgacatatttatctgaaatagcccatcacttattaaaatcacctgtgacatcatggcctggcacggtgactcacgcctgtaatcccagcactttgggaggccaaggtgggtggatcctttgaggtcaggagtttgagaccagcctggccaacatggtgaaaccccatctctattaataaagtataaaaaattagccaggattggtggcaggcacctgtaatcccagctgctcgggaggctgaggcaggagaattgcttgaacctgggaggcagaggttacagtgagccgagatcgtgccattgcactccagcctgggtgacagaggaagattcttgtctaaaaaaaaaaaaaaaatctgtgacatcagctaataggttaacttaattaaagagagcaattctggccaggcacagtggctcacatctgtaatcctagcacttagggaggccaaggcaagcggatcacctgaggtcaggagttcaagactagcctggccaacatagtgaaaccccatctctactaataatgcaatgcctggtgtgcacctgtaatcccaggtactcaggaggctgaggtaggagaatggcttgaacccaagaggcagaggctgcagtaagcggagattgcaccactgcactccagcctgggaaacagagtgagacgccgtctcaaaaaaaataaataaaaataaaaataggtattcaacttattgcttaaaaatgtatacaatttctttgtaaaattgttactgaatttttattttaattctttttttttttaatagagacagggtctcactatgttgcccagtttggtctcaaactcctgggctcaagtgatcctcctgtctcggtctcccagagtgctagaattacacgtgtgagccactgtgcccagcctgttactggatttttctatcattgcacttattttttaatgtctataaaaaatttgaaagacaaatatattaatacttatgttttatttatgcttccaaataactacacaaaatcactttctaaaagatgactcatctatgctttgcaatttttctgcccatgcatttcttctctgtgccacctctcttctgtgttgatgataggagagtacagttgtctctcagtacctgttagagattggttccaagaccttctcatggattccaaaatccacagaagctcaagcccctgatacaaaatggcatcacatttgcacataacctctggacatcttccggtgtactttaaattatctctagattacttataatatctaatacaatgtaaatgttatgtaaaagattgttatattgtattggttagggaataatgacaagacaaaagtctgtacatgtttattacagacacaactatcctttttttgtatgaatattttcaagccgagactggttgaatccacagatgcagaacccacagatatagagggtcatatccatgcattaataaaaagtttatgatttttacttaaattaatcaagaaatagtggtcccataggtcctttgaattgacttggtttggaaacatatggaaaaaatattcctaaaaaagtatttataaaaaaaagagaaaaaaaaacaaaaaagaaaactattgaaaagccgaaaaaagttataaaagatgagaaaaaattaaaaattgtgagtattcagatagcaattcttatcaacatgaaataatataatatggttatggcagttcatgaatagatatttgaactatatctttacataagttaaactgttaaaatttatacccttagcagaaggcaagattccaccggatgctacattgatttttgagattgaactttatgctgtgaccaaaggaccacggagcattgagacatttaaacaaatagacatggacaatgacaggcagctctctaaagccgaggtaattcaaaccaatttcatgtgtatagtctaatttttttatcacagtttaaatacatctgtgttacaactattactttttaggtctagctagcatgggctctgatcactgcttttatagagctggtcactaaaaaataatctaagcgcttagaaaaagctctaagctttttcagtataaaccttgtgagtcatcctgttcaattgcctttctccctgcaagagagtcattaaaatcccgaattatttgtctctacagtgctcttccagtttctagattacactagcatatctctttttcagacagcactgtaagaatttgcaacagggcaaataattcacgcctcataggatgatgaaaagagctagcaagggtctgaattgagtgggctagaaagttggtaaacaggagccagaagttcagccagctagcgtctgtatctcagccttgtaataaagatcttgtaataataatgataattgggctgggcatgtggctcatgcctataatctcaacactttgagaggccgaggtgggaggattgcttgagcccaggagttcaagaccagcctgggcaacacagggagacccccgtctctacaaaagatttaataaattagccaggcatggtggtgcatacctgtggtcccagctactcaggaggctgagaggtaggaggatcgcttgagcccaggaggttggggctgcagtgagctgtgatcatgccactgcactccagcctggaagatagactgagaccttgcctccaaaaaaaaaaaaaagataataatagataacatttattttatacttttagtaccaggtactatttataagcacataagtatgtgaacttatgtaatcttcatgatagtttatggggcagacactattgtcatcatcttcgcttttagatggggaaaataataatcaggttaatcagccaaaaatcacacagtagtaaggggcaaaacctgggcaatctggcttcatgactgttcttacatttcaattttttaaatttttcttagagacagggtctttctctgttgcccatgccagggtgcagtgaagtgatcatagctcactgcacccttaaacccctgggctcaagcgatccccgcagcatgccaccatacccagctaattttttttttttttttaagagatggagtctcactacattgcccaggctagtcttgaactcctggcctcaagtgattctccttcttcagcctcccaaagtgctgggattacaggtgtgaaccatcatgcccagcccactactatatttttaactttgggcctagactgcttctttcagagaaaatcatgaatgtttcaagtctaatactatttattgaattctaatgtcttacttagtcccactgacgatactcctgcttaaaattagtaaaccagctgtctcccctcttaactagttaggagacatttaaaaatgtgtaactctaccacataagtaagtagtaaaagctaactaggttgatttcaagtaataaaaataagtctttttctctgtttctttttcatctccctctccaatcctttccccacccagttcaacttcttacaccaggatattagtaatgactttcccttcaggcatcttggttggccaacagtggaagaaggagaagggaacatgtcctgttcttaagaagaagggcagttaccggggtggcaaatggttcccaaagtgtacttctctattgactccttatcacccttttttagagtgaatagcagctgcagatgaattcgcatagtacccaagagctcagcctatgcacacagaccactcattatcacaggcacaccaagagccacgttctgcagtatgaatactcctcagtaagacattagatgatcttaagttcttttctggaaaataaaaatagagaaaatccaaaatagtaatctacttatctacaatttccccagatgtctatgtgatatcagctgctttattgccagatggatgagagtgattttcactaacttgaataacaatagctgtcttttattgatggccataatcattattctaatcctcatatcaatcctacaatatagatacttacttatctccttttacagatgacaaaactgaggttcagagaggttaatttgcagaagaccacacagcaaatccaagacaaagcctgaagtagaaacacgaactaaaaaaacaaaaacaaaaacaaacaaacaaaaaactttattcattgtcagaaagattaagtaaactatttcatcagtgtacaggaaggaacatttaaaaaagaaaaagaaaaactttctttaatattaataaagacggaaaggacgggggaaatacagtattttattaaattaaaaagtggaaatagtgtggaacccattactagcaaaattaaggtcatgttcttacccactgtctttttgtacctctgtactgtagtttactggaaaaggagtcaagtttaagcatcagcaatattggttatgtaaaaataatttgacttacttagaaactgagaaatatttgaaggtattaaaaattgtttacccctacataggattgctaagctttggctggaagaaaaaaatgtgtctgcctcatgtaggaccaaagtcccatttgagaacagttgatgtatccttcattaaggtccactgattgctctaaaataaagtcaacttgcaatgggttgaccctgggatatgtattgctaaaaacctctcaaactctagctttcaaaaatactcttgcctctataatgccagccttactgaacattacctccagatgattgtgcattgctttctttagttattataaggattagtgctttccaaaggaaatacaattgttacacatataattttaaaatttttatagtcacatcttaaaaagtaaaaagatacaggtgaaattaattttaatgttatatcttcactcaatatatctataatattgccatttcaatatgagatcgatgtaaaattatcaatgagataactttttgaagtcttcaaaatctgttatatattttatatttatagtaacatatctcattttgatctagccatgtttcaagtgctcattagtcacatgtggctagtggctactatattggacaatacttttaatgtgtgtttgcatatagaaattttatataattagtgaatacttcaggattctttatttgacattattaaagagattattatagttatgtagacttggaggagagctatagaagcatagaaaaacttaaaatactaaattttatttcaaaccccatggttgtgttttattgattatacaacatattcattagttttagagattatagaaatgccaattgggtttctttcactaatggcagtcatgcgtgattttcctttgataataggaacagcatggattattagaaagcatttagtttcaacaaaattcagtttaaatattaatcttcgagtatgtaccactaaccatctatcatcttagggaaaactaatttgaagacctgtttctctccaaaacattgcttcaaagaataagaaaaataaaacctcaaatagcttttcatactgttgtatcatttactgtaagtaatcttgcacatgagtttcattattataactattccttaaagttactggaaattcactgtgataccttttaattaaaggaatgttattttggccttccagataaacctctacttgcaaagggaatttgaaaaagatgagaagccacgtgacaagtcatatcaggatgcagttttagaagatatttttaagaagaatgaccatgatggtgatggcttcatttctcccaaggaatacaatgtataccaacacgatgaactatagcatatttgtatttctactttttttttttagctatttactgtactttatgtataaaacaaagtcacttttctccaagttgtatttgctatttttcccctatgagaagatattttgatctccccaatacattgattttggtataataaatgtgaggctgttttgcaaacttaacttgcaggaatggtatgactgtgtttcctactgctttattctgtaaacaagaattgtagcaccatgaaacagacctctgggtcccagtgggcattttttcccctttcaggatgtaggaggacatgtatagtatgtcaaaaactgcaagcttttcccaactttaaccttaccagcatgttaatatccagtttttttatagtttaaaagttaaagtgcctcatattttgaaaatatccattaaggacccaggaattagcatttcacttgtttatacatttttataacattatgaagacgatataaaaatcctagaactgaagagtcttcctttggtatatgtgcaggaagatagttgtatatctctgttccacaaagaacgcaacacagtctctaaactttttggtgtaagcttctagccttgggtattttccagtggggaatgtttaaaaatatttgaccaaaccaaagactttttgcctcttatagcaagcataaagactgtactgcctggcttttgtattccttcagacattattgtaaatgtgcaactcctcttccctcttgtaaacctttataagatgtctgccaccccaagcttttgtcttgatagttttaaattgatgccatgaaatttcttagttttcgttccctttctctagttatctctttccttatgtcacctcatttcccatcattcttgtcactaatgatgaatgatcattacaaattggtatgctgtcaaattttgataaatgtgccaaacaaaggaggatatacagtgccatggcaattttgtgtcatggtcaagttatgatatcatatgacttgagaatagtatgtaagagatgctgtagaagatcacgttggtaccaaagaaagggcacatgtctatcggaacatagattttgcatactgcatggtatggtcaggctttgtgtccacacccaaatctcatcttgaaattataatccccataatttccataatccccacatgtcaatggagagaccaggtggaggtaactgaatcatgggggtggttttccccgtgctgttctcatgcaatctgatggttttataagtgtttggtagttcctcttgcattcattctcccacccgccaccttgtgaagaaagtccttgcttccccgccttccaccatgattgtaagcttcctgaggcctccccagccatggggaaccatgagtcaatttaacctctttcctttacaaattacccagtctggggcagttctttatagcagtgtgaaaatggactactacactgcatatataggaaagtatggtcagacagtaaatagctctgttcaaaataattgagttccaaacaagtaaagttttttctaccttctgaaacttgctctttccaaaccattgttcatcctttaacttctttacactatcaaaaattctatttaaaaatagagggctttcagatgagtacatacaaaaacaaacaaaagtatacataggggtaacacaaccatgagattagtaaataatacatatggctagcacataatttgacaccttataaaacaagaatctgtactatcttttccttcctcccaatatttcttcatttctatgctcaattttctaatactttttcacatgcttaatcatttactctttcatcgccttccctcaaaaaaacctgctccgttgaagtaaactaagtaactcaatattctttattttggtttggaacctgtctcaattttttgtatccatattaagaagtcaccctataatctaaactttgtaattctaatttttttgtcccattatcatacaaagtgcttttaaacttgtttttaaaaaatgacagataatgccacatgaataggaagatgattcattctaaaacttgtatttacataattaaaaataaatttataatcattctacatacaatacag

SEQ ID NO: 365 - DNA, 439 bp, Homo sapiens
tttttttttgcaggtgcaagatttaatagagtgaaatagagtgaaaacagagctcccatacaaggaggcgacccaaagggggttgccattgctggctggaatgcctggatttatatcctgatccttgtccctcccgctgtgctctcaggcaatagatgattggctatttctttacctcctgtttttgcctaattagcattttagtgagctctctgattggttgggtgtgagctaagttgcaagccccatgtttaaagatggatgtagttaccttcccagctaggcttagggattcttagtcggcctaggaaatccagctagtcctctcagtccccactctcaacaggaaaacccaagtgctattggggaggttggccgatgactgctctaactgcttcctgctgaactggggcataggaggggttgtgcagctgagatt

SEQ ID NO: 366 - DNA, 569 bp, Homo sapiens
taaccttggatagccacaattttatttagaatataaaacatggaactcgacttcggaattttagtctagaaatggggacttccccctagcttttatgatttttgaaactcctgcttggacgcaattgtcatcttgcataatcgacagtaattttcaggtttatggaattttgcaaactttaagcaaagcacatcaatcaggctcagtgctgcggcttttcttcgcatcaccgaggtagaatagcacctctactcccagaacttaatccaggcgaatgcagaaggcctttgctggttttctggtttgggtagtctttgggtattcacttggaaacaaggcgaattgatggatggatagagtgatggatggatatgtaataaatataatatagttcaatgacaggatccagatggtgggtgtaggagagtttactgtagaattcaactttctgtgtattttaaaggttttcatactaaaattggtggtgaagtggtgttgtcacacagatttgaccaaatccctgctgcgtattagctgtgagattgggacaacatgcccaatactcaagt

SEQ ID NO: 367 - DNA, 13220 bp, Homo sapiens
agatgtcatagacttaaaaaaaggagtggctcattttgaaaggattggaggagtaagttactgaaattgttaagtgcttaataaaatgaatcaagtcttttacatgaatcaccatttttcatagttactctctccatctttatttgcatggataatcactgactgtttttgaagctacatttgtttttgttttggtttattttgtttcgtgtcttccgtagaaatacttgttttctagatgtaattataataagggggataataaaagggtttagatacaagaaatgacaatgatactagtatatcttttaatttcagagttgttttatgtttcgtatttatccagctgtaacaataaagtaggacttgttatatgggcttacgtttttatccatttctccctttctgtctgcaggaatctgttggggatttgatgataaggaatattcagttacatcattcaggaaaatatctctgcacagtacaaacaaccctagaaagtttatctgcagtagccgatatcattgttagaggtaagcataaatggtgaaaaagtgatcacattgtttcttcacagttacagtgttcatatctaaattgtagacctctgagaaaccacaccatgttatggaagtgagatgtaatcagatagagttttattttttaaaccccaggactccatggtatgggtagtgtgaatacagacatggaactgtgtgaatacagacatggaactgtgtaggatttgactatcatgaacggtcacgcttggcaagcggtgtcagtaactaaaacttagacataccttctgtttataataaatcattcttgtcaatccagagtcaaatccacatgctcctgtagttcttcatattagctgcaattacttgagttagattttaagaggaattaaagatgatggttctcaatctttgagtataggttgatatgcaatcatcctatgcctgatattttctaatctccagaggaagcactactacattaatgtcatttaccatgtaaagggaattaatagaactttatcgctaataatgtgctataaatacattatggtcaatattttacttcctaagcacaacaggtaaaaataaaccatcctagtaccaaattaatgaatgtaagtatctccaatggagtcatgataaaacatttttttcaaggtccaccaggtcctcctgaggatgtgcaagtggaagacatttccagtactacttctcaactaagttggagagcaggcccagataataacagtcccattcaaatatttactattcagactcggacaccattttctgtgggttggcaggctgttgctacaggtgagtgacaaaagtgttttgggtcactttaaaaataatattttagtccaataattttaataaatgcaattacattttaaattaataattatataattttgtacaattatttgtttttgagtagtcccaacctaggtgccttagtgtctcattctttttagttccagaaattctcaatggtaagacatacaatgcaacagtggttggtttgagtccttgggtggaatatgaatttcgtgttgttgccggcaacagcattgggattggagaaccaagtgaaccatcagaattgttaagaactaaagcatcaggtaaagaatcaatgtgttctaaaagtgtggaagatttcgtatgatacagttcttaaaacaaaacaagtatttttatgtgtcttctaatacttttggctcaaaattgtttggcagtaaacgagtggctctcattttcttttatttttacatacacaaggcaaggtgtattttctccaaatagtaggttcaataagaaatgattacctttaagccaacatgtcaaaatcagagttcttaggaaactgtgtttgcatcgcatctattttctagtcaaaattcattagagaatctgtagatttgtatatgcaaatgagttactgcttgtttcattaaaatgttgtagccaggaattaactgagactctgttggtgcagtcagccatatattttcatctatttctcaactctgaactagttgtagcttcactgagcagtagtataaatttttttccatgcaaatgaggtaaatcctaagctcatttaacaggggcactaattgagcattaattggttcactgaacagcagaacgcaagaacctggatcagataccatgccttcttaagctcttttcaatggatcctctttgttccactcaaacttttacatccagggtgacatttaatctgctagctgtatatagcccacaaagttcacattcttattcgatcacataaacaaaggatcacttgtcatggctagcttaatttaacaaacacaaattaccttattaaagtgtgcacaattgtcagaagtcaataaatcaatccttaaactaaagataatgttatatgtttatcatagaattggggctagaaaaaggacatacttgacagtgatatcatccaattaaatcacgctagaagcttacagctgagaggaaatccctttgttttacagaagaggaaaatgaacaccaggatattagctggttgtttgtgacagagctaggttttgaatccaaacctcctgatttttacacccagcattctccataaaagaggatcttaatgtagatgagcaatagattagccaaagaaagtgtgtaaatatagaaattccccggccctcctatataccccctggatcagaatcttcaggtgttgtccatgactctggatatgagctttagtttcaggttgtttgtttacagttgatttatattttggtagctttggacagggttgacagaaactcttacattttcatagcaaagtttgtgtgccaccttctaaccattaatactctcttgtttcagtagcagaatgagactggtgatattcatacccactgagtcaaactctactaactgaaaacctactgagtctctcgtctctccctctctgtctctgacatcatcaaagactaacaacttgttctcaatatggttttaggcttaagtacaattaatttaaaattgaatagggaaaggaattttctatttctcagaacattggaaactttgtagaaagtaaatcaaaatataattcaaaatacttttccttacacagctaaactatgcaaagatcctgagatagtgtgcagttagtcactctaagctgtcaagcactataaattcagcaactctgtaaaatccactctgattcacatcgcttttgatcaaaggcattggaagtcttagaaaataaggtttaggttcacataacttctttctaaaaaattatgaagcttaaagctgacaaagttaagggtaaatttaaatacgaaaaggtatatctgaaaggtgcaattttgaaaaagaacaatcagattatcatatgactattttctggtcatgtttatagagctaaacatcagtatgaaatggaaataaataaaataagcaatctagatttatttaggtggtctatatggtggggaaaaatttgaaatgaggaattaaaacttacatattttaatccctgcctaccaatccccagacatatccaagtgcctcctcaaccaaccacctctcctattgttcagacatggtccagtatagacaatttcatgtaattccacatttaaaaagtataccctgctgatttagcgattatcacagatttaggatacttttgtcattacgtcaagaaaaataatgctttgaaacacttacgcatgtgtaaagtaaaacctcatgctcgtgaggcactacaataccatatacacactcagcatttcctcagcctgacagttactatgatctatgattcatcgtgtaagtccttacaaggatacagagttgaagggcatcgtcttataactcatcaaaattactggtttctgaatcctctaccacagagccttagatcccaagaaataaatagaaagaacctctcccagtcgcattcttgacaggagaaaaacctgactttgcaagtgaaaagttagaagaaaatccctcttcttctctcccgagagatttgagattgtaacgaggagttttaaaacaagaatatttatttacatatttttcagtatttaattttaactggtaaaatatcctgatgactaataaaaggaaaaattagtttagtttgtttattgaaaaaaaataattaatatactgcctcagtaacttgtttacagctcaactgtataattaggcactaaatcagcagtgtcactgtcaccatctgaatggaacatcattttgccaattagtagatgatgcataatgatgtcaaatacccgatgttactcaatttttaattaattttggagccagggtgctcatgtatcaaacacaactgtgtcctctctcttagaaatttggatatgtgtaaacataatttacgttcattaaaaatgcaagactctctcacagtatgcctgtgtgagattttgaaaagtgaaattcaaaaacaaaattcttcctgatgaagacgtactttaataattgccatcccacatttctcttggttatttttagtccctgttgtggcaccagtaaacatccatggaggtggaggaagtcggtctgaactcgtcattacgtgggaggtaattttctgtccaactgagttattttgaagaaaagagatttaactggccagaaagaaactgaaaaacaaaaagatttatttgatcactattgagagcgtaaaaaaatatggtataaaaatacatcatcctgatgatgaattatttagaggaggtattaggaacttttctcatggtgagacagtatgacgaactcagcacaattttctcccaaatacacgaaaaacaacttcagtatctattgagcgtgtgtcagtagcattttcgttatcgcttgatgaattaggcattgtttgatttgttacctgtggcactgttgtattgtgaataagttgagcccagtagactgtaggcaaaaaatagttcttgtcctaaccctgctgttcacctctgatcaactcattcttccctgcatctagatgaaagcttaggcacatggagtagattttgtggtcattcttattacccattaacatacaggctcatttttttaccttattaaaaatttcagtctggtgtgtacacttcaaactggagtataaacgttagaatttagactttcaaccaatttaaagtttctcattttcagtatctcagtgcctcagcctaagaattctatagcgtgaaagggaatacgtggtcagttcaacttctctccattctgctctttaatttatctttccccattcacagtgttacctctggattctccagagctgtagaaggttggtgttggtaggggaggagaaaggaaaaggtctggattgctggtacatttctcgtttgactttggtgtgctctagttatggcaaattatcagacgctgccatttcatagggtagggtttctgcgttttttaatttattttttatctgggagatggccactggatgatcccccaccaaggactcccaactgcaattccttggtgcagacccaactggctgctgaagggtatcagttcctggattttggtggtccatttccagactcttccagtgaatattctctctcttgtaggtggtctttgtggatagagtccccttgaaggctgtccatggatgacccacttgcatgggtttcacatttgtcctcagcagacacataccctgctccatgtttagcggaagtgcaatgcatacccacttagcatctctcttcactctgccaccgtgggctgtctggatctcttccccactttaaatttctcagacatttgtcagttaaatgaacctgcgtcccttatgttccaggaaatgcaaaccaggtgtttcttgctgtagcctacttcacatagctaggctatgagagataactgggaaccagagacgttattctttatggttataaatgacagtgtcagaaactagatgcaattgccctgaaagtcaccctttcctctggatatcttgtttcatgtggacattataggcctagcacagtgcttggaaagtggtccaccctccatgaacacttgttgaatggaaggtagtgttttcagagagttggaactctcagaggccagacagagggggaaaccctattttttcaagcatttacaggatttcaggtgccacacagagcatttcatatcattcagtccccacaataatgctataaggtggttataccactttcaagtaagaaaactgagacttagaaaagtgacatcattgggcagagaagcatttgaacacagggttctctctttctgttcttttactgtatcctgtattacaatcccaattgtcttcatgcactgtgatggctgagggtgggcctgagtccttgagtatatctaccttaagtagtaagttaaccatattatacctactactccaaacatatttcccataaaacactgactttcaaatgagtctacaagagaattgtttgtgagtagtttatttaggtttctatattcatcaaaggccaaataagcattatcatcatagtgtacaggaagttttgcctgacttaataacttattttgttctcctccttggtaagaaattcctacaggctgttgttgcaattgcttgtacacagtctataatgagggcccaaatgctatgcattcattcttaaatagagatgagcatgaattaccaaagaatactgtctttccacgatttataatgttcttttttctttaaggcaaaggtacacaaaccatgacctatgagacaaatttgtctagtttcctgttttgataaataaatccacccatagctacatccattaatgtattgatgctttcttgctgttgcatgagaccatatatcccacaatgcttaaaatatttactatctggtagcaacaatagacgctagcgtctgctagagtgacgagaggaagggcgagggttgaaaaactagctatattaatgggtactgtgctcactacctgggtgacgggatccatcataccccaaacctcagcatcacacagtatatccatgcaacaaacttgcacatgtacccccgaatctaaaataaaagttgaattttttttttaagtttactctctggccctctacagaaaaagcatactaacccctatttttaaaaattaaactaaattaaagccacttcctctgtgtttattttttcttcctgaggaggaggtggggggtggatatctgatatgcagatacttgcagaaagtaaattagtgaaatcggtttcccatttatcactcatatttgacattatgtacaagcagatactgagccaacttcttctggtgcccagcttctttatggaataagttatgtatatttaggagaagattcatacattaggatgaatctgagccaccagaatgcaggtagtaattccttcaatttaatgaactctattaggtagcttctctgttcctatcagtggaatacaaaaatggatgagaaaaggtctgaatgctcagaagcgtagaggacagaatggtcttaacccagcctggaaggaggtcaggaaagacaccatcagaactgagtatatctgaactacgttttgaaaagtgacttggaagtagagaggccaccccaggtcaatgtcactcctgttgtagttgaaatagtacctgttggactttgaaaggcactgcgcgacacaagactgttctaagttcagtcacaatctgccattacgtttcataagtgacaactttaatgattatccttcatttaggctccctgtggtataatctgcctgaactgaactaaatatctttcccgtgttttccccagagccacacaataaatgtagattttttgtttatttgttttgatttggtttgtttccaaaaacctagacataatatcaaatttttagaatatagcaatgggtaattcctttttaagggcatgtttatacattattttatcataatgtgtatactcccaaatacttccaggtttgaggtgcttgtggtgaatgtctcataaatattactataaaattaggtacacaggataaagcactatagagtaagagatacatacctacactgagggttggcacgctttttatttaaagggccagacagtaaaaatattcagtctcgtgggccacatgacctcttttctaatgtctcagtctgcttttgtagctcaaaagagccacataccacttacaaacatataggtgtgggtgtgtctcaaaacctttattttcaaaaccaggctgcatgccagatgtggctagaagtacatagttttgctgattcttagtctgtactaaagatttggttcttacagacactgtggttgagaattacattattagtttatcaattttcatagattttactcccaggagaatttcacaatttctttattttactgaacactgtctccacttaaagaaaactctttttctggccttgttaaataactatatatattttttaatcatttgactctctgttgatgtaagaataaagggaagtatctaaataagtctcttttttcccctctaatctgcatatgttggactcaggtctttcttgagagagcaccatgagaaacactaattgtacttgactaacaaaaacaaaactcccctatttatgtagatgaactgactaagcatcgtgattaaatccgagatgaaagaaacttcagaaatgaatcaaatgctctagcaagtagcatcgattcttataaatctcttccatgccattcaaaattaactggtttacttctagtctccctatgaaaaagaagagaagtgttaatatgaggaaatactttgttgtttccccagatgtccggagcagcacttttcttcctcttttcactttctgtatttgttagactgttccacatggcaagaaatagagaccagctcaggtcatctcgggtaatgggggtttattttaaagctacatgggaagtaatgaggacaggaaaaaagtctcagcaagcaggcaggaaggtcagatgaagaaccggaacatggttcatcactgctctgggcactcgggcacaggagctctaggcaaccatcaacaacccctctgctgatccagccccggcttgaatagtctctcatgcttatgcctcagttcctcccatttcctttacttccagttttctacctggctgccagctaatttggatgccctctctctaatttacagcatctgttttctcttagcttctattgcctcactgttcctgctactccatgttctctactttttgcctgctctgtgtatatctatcattgttttgccacccaccatgtttcatatgcaaactctgtgagaggaattgaccaggtctgttagtcaccgtagagtacagagattctgccctcatagatactcaccaagacggtgcctgtggttctggcgctcgtgaattggtgctcgcatgggttccaagtggcaagatagatagtgtgattgatagaataaatggactcccatgaataaagagaacctctgaaatggagttgtggacatgagggactagaagcactgtgtcctgtcaggtgttgcctttattagtctgtcagaatatttattaaaaaaaaaaaagcaaagcattttccttgggaaaaaccaaataaattccattgatttttcaatacaagtttcttgccatcaggagatatgttggtctaaattcaagtacagattcattttaatttgctaagtttatgtgattgtttacaatttttagtatctgcagagtacagggggaatattaccaatttctattttgctattttagtaattttagatttgaaatgtattttatagaatctgatctttgtgagagttaacagtttattctttcatgtgaggaaaaatgcacacatgtcactaccaatgaagatgtatgcctaaaaaaatgatgggaggtcttttatacttttttaaagaaatattctgtgtcttaaagcatatgttatttcacagtaattccattacacatgtcttacaaaaacttgtttaaaatgttgtgaaaggaaaacatatctagtcttgaaataaatagttaagaagttaatttgtgctgagtttaaaaattcatatcaaaccacatttgagtgtgtatcataaaatcttttaaactgttttattattataatttatgaatgatcaaagaaaaatatataaatatgtaaagcttgttttatatttctatctgaaaacttaaactatttatctgagtatctttaactgggatcatttttctaattggcattccaaataaaagtgttttttaatacatcattaaacagaataaatatccatatttgtctctatggaagaaatgtgaaataatcaataaacattatagtagcttaataaaatatttttgcaaatactcagtgattgatcacattctgcccaagtcaattccagaagaactgcagaatggggagggatttggatatatcatcatgttccggccagtgggctcgacaacctggtccaaggagaaagtgtcatctgtggaatcatcaaggtttgtctacagaaatgaaagcatcatcccactgtctccctttgaagtcaaagtgggtgtgtataataatgaaggagaaggatccctgagtactgtgaccattgtctactctggggaagatggtaagttgtcctcaactctggttttctttgagactctatgcatagtttgtgttcccttgttccattttcaatgaaccactctgctaaagatggttatgtctttctctggatggtagaacctcaactggccccaaggggaacttctctccagagtttttctgcttctgaaatggaggtttcatggaatgctattgcctggaatagaaacactggaagagtgctgggctatgaggtaatccacattaatttcacttttgcttatgaatgtgccaatggacttcgcaatagctcctattcaacagtcctatcctactagcctgttgttagcatatgataatgtgtgtctaaagctaaagcagagaatgaagttgagacagggtaggtgagcccccacattgagaggcttagcctgggatgtttcttgtcctcgctcaagacagaattcgagagtgagccagtggtaaaaaaacaaaaacaaaaacaaaaacaaaaaaaaacagctttattgaggcagcagtgttacagttttgaaattgcttctgcagagcagggctaccccataggcagtgtgctaagagcagcagcttggaagcagttctacactcatatttatacccacttctaattacatgcaaattaatgggtgagttagttattcagaaatttctagaaaaagggtggtaacctccaggccattgccatagaaagggatggtaacttccaggtgttgccatggcagtggtaaactgatacggaactggtggttgtgtcttatggagaggtgctttagcctcttccctgtttcagtcagtcttcaatctggtccacagtaaagtcctgcctcctccctcaaagtaagggaaatctttctaggtaattcaaagcaaacaaattaacacatagtagccatttttaaaggcatacagattcagtaagtaagatgagtaagctctaaagatctgctgtacaactgtgcacacagagtcaacaattatgcattgtacccttaaaatttttcaagaggacagatctcatattaagtgttcttaccacaacatcatttttcaaaagtgatcaggtgattatatgattaattattcaaattgcagtcatttttttttcccttggtaagaggtgaagtctgctcctcaatcatcttacaccatggaagaatttcattgagaaacctgctttgtgaattgcagtataacttggaaagatgtaatcatctcagaaaaggcagttaagtaatgaaaaaaaatacctagattgtcttgaatctgctatttttagtctatgaagaataaggcaaattacatttgtaggccttcatctcacaaagtaaagagacaagaacattttaagggaaagttgttcatcactcaatctttttcaacttgcaaattcagtgattcacaaaatgggtaacataatttatttaactttggatttagaataaatgtataatcctaaacattcttaattttgcctatatatatatatatatatatacacacacacacacgtatacatatacatactatatatacacacatatatatacatatatacacatatatatacatatatatacacatatatatatatatatatatatatacacacacacacacacatatatatatatatatataaccataatcctctgattccaacagaaagttctactctcaggacaggtgtcttttccactccatgccaagaatgccttacctcttatctgaaccctagttacttctcaaatttcatccctagtcgcctcttctctctgagctctactcccatcaattcctgatgtattttgtcaaattcttgtagcatattttttctataccacttctttgcaatgcattctgtgacttattttcacatacactgtggattctaacctcttagctagatgataaggggcttgaaaataggtacttaatttattctctttttttttcaatgtacctaaaacaatgctaatgcaaaggtagggttcagtataaattgaattattaattaacctgtgattcaaataactctgaaaagaaatgccaatagcaagacattataatgaaagtctttgactgattatatacaaatgtgtttttgtctgacttgttatacatcatttgctaaagctggtaacctttagatagctcataaaatactttattttggtaatctaaaaaatcacgttctctaatttccattgtgaatttgcattcatgacttttttcctcataaatattagagaataacaattttgttgttgtataaccattttaattagaaaacgtttttgtcatctatacttctgtcttcttcccatattccttgtggttgtggttgatagttgttggtaaaaaatgattgatagttattggggaacaataaattgcttgttttggtttttaattatcaggtcttatactggacagatgactccaaagaatcc

SEQ ID NO: 368 - DNA, 10957 bp, Homo sapiens
agatgtcatagacttaaaaaaaggagtggctcattttgaaaggattggaggagtaagttactgaaattgttaagtgcttaataaaatgaatcaagtcttttacatgaatcaccatttttcatagttactctctccatctttatttgcatggataatcactgactgtttttgaagctacatttgtttttgttttggtttattttgtttcgtgtcttccgtagaaatacttgttttctagatgtaattataataagggggataataaaagggtttagatacaagaaatgacaatgatactagtatatcttttaatttcagagttgttttatgtttcgtatttatccagctgtaacaataaagtaggacttgttatatgggcttacgtttttatccatttctccctttctgtctgcaggaatctgttggggatttgatgataaggaatattcagttacatcattcaggaaaatatctctgcacagtacaaacaaccctagaaagtttatctgcagtagccgatatcattgttagaggtaagcataaatggtgaaaaagtgatcacattgtttcttcacagttacagtgttcatatctaaattgtagacctctgagaaaccacaccatgttatggaagtgagatgtaatcagatagagttttattttttaaaccccaggactccatggtatgggtagtgtgaatacagacatggaactgtgtgaatacagacatggaactgtgtaggatttgactatcatgaacggtcacgcttggcaagcggtgtcagtaactaaaacttagacataccttctgtttataataaatcattcttgtcaatccagagtcaaatccacatgctcctgtagttcttcatattagctgcaattacttgagttagattttaagaggaattaaagatgatggttctcaatctttgagtataggttgatatgcaatcatcctatgcctgatattttctaatctccagaggaagcactactacattaatgtcatttaccatgtaaagggaattaatagaactttatcgctaataatgtgctataaatacattatggtcaatattttacttcctaagcacaacaggtaaaaataaaccatcctagtaccaaattaatgaatgtaagtatctccaatggagtcatgataaaacatttttttcaaggtccaccaggtcctcctgaggatgtgcaagtggaagacatttccagtactacttctcaactaagttggagagcaggcccagataataacagtcccattcaaatatttactattcagactcggacaccattttctgtgggttggcaggctgttgctacaggtgagtgacaaaagtgttttgggtcactttaaaaataatattttagtccaataattttaataaatgcaattacattttaaattaataattatataattttgtacaattatttgtttttgagtagtcccaacctaggtgccttagtgtctcattctttttagttccagaaattctcaatggtaagacatacaatgcaacagtggttggtttgagtccttgggtggaatatgaatttcgtgttgttgccggcaacagcattgggattggagaaccaagtgaaccatcagaattgttaagaactaaagcatcaggtaaagaatcaatgtgttctaaaagtgtggaagatttcgtatgatacagttcttaaaacaaaacaagtatttttatgtgtcttctaatacttttggctcaaaattgtttggcagtaaacgagtggctctcattttcttttatttttacatacacaaggcaaggtgtattttctccaaatagtaggttcaataagaaatgattacctttaagccaacatgtcaaaatcagagttcttaggaaactgtgtttgcatcgcatctattttctagtcaaaattcattagagaatctgtagatttgtatatgcaaatgagttactgcttgtttcattaaaatgttgtagccaggaattaactgagactctgttggtgcagtcagccatatattttcatctatttctcaactctgaactagttgtagcttcactgagcagtagtataaatttttttccatgcaaatgaggtaaatcctaagctcatttaacaggggcactaattgagcattaattggttcactgaacagcagaacgcaagaacctggatcagataccatgccttcttaagctcttttcaatggatcctctttgttccactcaaacttttacatccagggtgacatttaatctgctagctgtatatagcccacaaagttcacattcttattcgatcacataaacaaaggatcacttgtcatggctagcttaatttaacaaacacaaattaccttattaaagtgtgcacaattgtcagaagtcaataaatcaatccttaaactaaagataatgttatatgtttatcatagaattggggctagaaaaaggacatacttgacagtgatatcatccaattaaatcacgctagaagcttacagctgagaggaaatccctttgttttacagaagaggaaaatgaacaccaggatattagctggttgtttgtgacagagctaggttttgaatccaaacctcctgatttttacacccagcattctccataaaagaggatcttaatgtagatgagcaatagattagccaaagaaagtgtgtaaatatagaaattccccggccctcctatataccccctggatcagaatcttcaggtgttgtccatgactctggatatgagctttagtttcaggttgtttgtttacagttgatttatattttggtagctttggacagggttgacagaaactcttacattttcatagcaaagtttgtgtgccaccttctaaccattaatactctcttgtttcagtagcagaatgagactggtgatattcatacccactgagtcaaactctactaactgaaaacctactgagtctctcgtctctccctctctgtctctgacatcatcaaagactaacaacttgttctcaatatggttttaggcttaagtacaattaatttaaaattgaatagggaaaggaattttctatttctcagaacattggaaactttgtagaaagtaaatcaaaatataattcaaaatacttttccttacacagctaaactatgcaaagatcctgagatagtgtgcagttagtcactctaagctgtcaagcactataaattcagcaactctgtaaaatccactctgattcacatcgcttttgatcaaaggcattggaagtcttagaaaataaggtttaggttcacataacttctttctaaaaaattatgaagcttaaagctgacaaagttaagggtaaatttaaatacgaaaaggtatatctgaaaggtgcaattttgaaaaagaacaatcagattatcatatgactattttctggtcatgtttatagagctaaacatcagtatgaaatggaaataaataaaataagcaatctagatttatttaggtggtctatatggtggggaaaaatttgaaatgaggaattaaaacttacatattttaatccctgcctaccaatccccagacatatccaagtgcctcctcaaccaaccacctctcctattgttcagacatggtccagtatagacaatttcatgtaattccacatttaaaaagtataccctgctgatttagcgattatcacagatttaggatacttttgtcattacgtcaagaaaaataatgcttttaaacacttacgcatgtgtaaagtaaaacctcattctcgtgaggcactacaataccatatacacactcagcatttcctcagttttacagtttctatgatctattattcattgtgttagtccttacaaggatacagagttgaagggcatagttttttaaaactcatcaaaattactggtttctgaatcctctaccacagagccttagatcccaagaaataaatagaaagaacctctcccagtcgcattcttgacaggagaaaaacctgactttgcaagtgaaaagttagaagaaaatccctcttcttctctcccgagagatttgagattgtaacgaggagttttaaaacaagaatatttatttacatatttttcagtatttaattttaactggtaaaatatcctgatgactaataaaaggaaaaattagtttagtttgtttattgaaaaaaaataattaatatactgcctcagtaacttgtttacagctcaactgtataattaggcactaaatcagcagtgtcactgtcaccatctgaatggaacatcattttgccaattagtagatgatgcataatgatgtcaaatacccgatgttactcaatttttaattaattttggagccagggtgctcatgtatcaaacacaactgtgtcctctctcttagaaatttggatatgtgtaaacataatttacgttcattaaaaatgcaagactctctcacagtatgcctgtgtgagattttgaaaagtgaaattcaaaaacaaaattcttcctgatgaagacgtactttaataattgccatcccacatttctcttggttatttttagtccctgttgtggcaccagtaaacatccatggaggtggaggaagtcggtctgaactcgtcattacgtgggaggtaattttctgtccaactgagttattttgaagaaaagagatttaactggccagaaagaaactgaaaaacaaaaagatttatttgatcactattgagagcgtaaaaaaatatggtataaaaatacatcatcctgatgatgaattatttagaggaggtattaggaacttttctcatggtgagacagtatgacgaactcagcacaattttctcccaaatacacgaaaaacaacttcagtatctattgagcgtgtgtcagtagcattttcgttatcgcttgatgaattaggcattgtttgatttgttacctgtggcactgttgtattgtgaataagttgagcccagtagactgtaggcaaaaaatagttcttgtcctaaccctgctgttcacctctgatcaactcattcttccctgcatctagatgaaagcttaggcacatggagtagattttgtggtcattcttattacccattaacatacaggctcatttttttaccttattaaaaatttcagtctggtgtgtacacttcaaactggagtataaacgttagaatttagactttcaaccaatttaaagtttctcattttcagtatctcagtgcctcagcctaagaattctatagcgtgaaagggaatacgtggtcagttcaacttctctccattctgctctttaatttatctttccccattcacagtgttacctctggattctccagagctgtagaaggttggtgttggtaggggaggagaaaggaaaaggtctggattgctggtacatttctcgtttgactttggtgtgctctagttatggcaaattatcagacgctgccatttcatagggtagggtttctgcgttttttaatttattttttatctgggagatggccactggatgatcccccaccaaggactcccaactgcaattccttggtgcagacccaactggctgctgaagggtatcagttcctggattttggtggtccatttccagactcttccagtgaatattctctctcttgtaggtggtctttgtggatagagtccccttgaaggctgtccatggatgacccacttgcatgggtttcacatttgtcctcagcagacacataccctgctccatgtttagcggaagtgcaatgcatacccacttagcatctctcttcactctgccaccgtgggctgtctggatctcttccccactttaaatttctcagacatttgtcagttaaatgaacctgcgtcccttatgttccaggaaatgcaaaccaggtgtttcttgctgtagcctacttcacatagctaggctatgagagataactgggaaccagagacgttattctttatggttataaatgacagtgtcagaaactagatgcaattgccctgaaagtcaccctttcctctggatatcttgtttcatgtggacattataggcctagcacagtgcttggaaagtggtccaccctccatgaacacttgttgaatggaaggtagtgttttcagagagttggaactctcagaggccagacagagggggaaaccctattttttcaagcatttacaggatttcaggtgccacacagagcatttcatatcattcagtccccacaataatgctataaggtggttataccactttcaagtaagaaaactgagacttagaaaagtgacatcattgggcagagaagcatttgaacacagggttctctctttctgttcttttactgtatcctgtattacaatcccaattgtcttcatgcactgtgatggctgagggtgggcctgagtccttgagtatatctaccttaagtagtaagttaaccatattatacctactactccaaacatatttcccataaaacactgactttcaaatgagtctacaagagaattgtttgtgagtagtttatttaggtttctatattcatcaaaggccaaataagcattatcatcatagtgtacaggaagttttgcctgacttaataacttattttgttctcctccttggtaagaaattcctacaggctgttgttgcaattgcttgtacacagtctataatgagggcccaaatgctatgcattcattcttaaatagagatgagcatgaattaccaaagaatactgtctttccacgatttataatgttcttttttctttaaggcaaaggtacacaaaccatgacctatgagacaaatttgtctagtttcctgttttgataaataaatccacccatagctacatccattaatgtattgatgctttcttgctgttgcatgagaccatatatcccacaatgcttaaaatatttactatctggtagcaacaatagacgctagcgtctgctagagtgacgagaggaagggcgagggttgaaaaactagctatattaatgggtactgtgctcactacctgggtgacgggatccatcataccccaaacctcagcatcacacagtatatccatgcaacaaacttgcacatgtacccccgaatctaaaataaaagttgaattttttttttaagtttactctctggccctctacagaaaaagcatactaacccctatttttaaaaattaaactaaattaaagccacttcctctgtgtttattttttcttcctgaggaggaggtggggggtggatatctgatatgcagatacttgcagaaagtaaattagtgaaatcggtttcccatttatcactcatatttgacattatgtacaagcagatactgagccaacttcttctggtgcccagcttctttatggaataagttatgtatatttaggagaagattcatacattaggatgaatctgagccaccagaatgcaggtagtaattccttcaatttaatgaactctattaggtagcttctctgttcctatcagtggaatacaaaaatggatgagaaaaggtctgaatgctcagaagcgtagaggacagaatggtcttaacccagcctggaaggaggtcaggaaagacaccatcagaactgagtatatctgaactacgttttgaaaagtgacttggaagtagagaggccaccccaggtcaatgtcactcctgttgtagttgaaatagtacctgttggactttgaaaggcactgcgcgacacaagactgttctaagttcagtcacaatctgccattacgtttcataagtgacaactttaatgattatccttcatttaggctccctgtggtataatctgcctgaactgaactaaatatctttcccgtgttttccccagagccacacaataaatgtagattttttgtttatttgttttgatttggtttgtttccaaaaacctagacataatatcaaatttttagaatatagcaatgggtaattcctttttaagggcatgtttatacattattttatcataatgtgtatactcccaaatacttccaggtttgaggtgcttgtggtgaatgtctcataaatattactataaaattaggtacacaggataaagcactatagagtaagagatacatacctacactgagggttggcacgctttttatttaaagggccagacagtaaaaatattcagtctcgtgggccacatgacctcttttctaatgtctcagtctgcttttgtagctcaaaagagccacataccacttacaaacatataggtgtgggtgtgtctcaaaacctttattttcaaaaccaggctgcatgccagatgtggctagaagtacatagttttgctgattcttagtctgtactaaagatttggttcttacagacactgtggttgagaattacattattagtttatcaattttcatagattttactcccaggagaatttcacaatttctttattttactgaacactgtctccacttaaagaaaactctttttctggccttgttaaataactatatatattttttaatcatttgactctctgttgatgtaagaataaagggaagtatctaaataagtctcttttttcccctctaatctgcatatgttggactcaggtctttcttgagagagcaccatgagaaacactaattgtacttgactaacaaaaacaaaactcccctatttatgtagatgaactgactaagcatcgtgattaaatccgagatgaaagaaacttcagaaatgaatcaaatgctctagcaagtagcatcgattcttataaatctcttccatgccattcaaaattaactggtttacttctagtctccctatgaaaaagaagagaagtgttaatatgaggaaatactttgttgtttccccagatgtccggagcagcacttttcttcctcttttcactttctgtatttgttagactgttccacatggcaagaaatagagaccagctcaggtcatctcgggtaatgggggtttattttaaagctacatgggaagtaatgaggacaggaaaaaagtctcagcaagcaggcaggaaggtcagatgaagaaccggaacatggttcatcactgctctgggcactcgggcacaggagctctaggcaaccatcaacaacccctctgctgatccagccccggcttgaatagtctctcatgcttatgcctcagttcctcccatttcctttacttccagttttctacctggctgccagctaatttggatgccctctctctaatttacagcatctgttttctcttagcttctattgcctcactgttcctgctactccatgttctctactttttgcctgctctgtgtatatctatcattgttttgccacccaccatgtttcatatgcaaactctgtgagaggaattgaccaggtctgttagtcaccgtagagtacagagattctgccctcatagatactcaccaagacggtgcctgtggttctggcgctcgtgaattggtgctcgcatgggttccaagtggcaagtagatagtgtgattgatagaataaatggactcccatgaataaagagaacctctgaaatggagttgtggacatgagggactagaagcactgtgtcctgtcaggtgttgcctttattagtctgtcagaatatttattaaaaaaaaaaaagcaaagcattttccttgggaaaaaccaaataaattccattgatttttcaatacaagtttcttgccatcaggagatatgttggtctaaattcaagtacagattcattttaatttgctaagtttatgtgattgtttacaatttttagtatctgcagagtacagggggaatattaccaatttctattttgctattttagtaattttagatttgaaatgtattttatagaatctgatctttgtgagagttaacagtttattctttcatgtgaggaaaaatgcacacatgtcactaccaatgaagatgtatgcctaaaaaaatgatgggaggtcttttatacttttttaaagaaatattctgtgtcttaaagcatatgttatttcacagtaattccattacacatgtcttacaaaaacttgtttaaaatgttgtgaaaggaaaacatatctagtcttgaaataaatagttaagaagttaatttgtgctgagtttaaaaattcatatcaaaccacatttgagtgtgtatcataaaatcttttaaactgttttattattataatttatgaatgatcaaagaaaaatatataaatatgtaaagcttgttttatatttctatctgaaaacttaaactatttatctgagtatctttaactgggatcatttttctaattggcattccaaataaaagtgttttttaatacatcattaaacagaataaatatccatatttgtctctatggaagaaatgtgaaataatcaataaacattatagtagcttaataaaatatttttgcaaatactcagtgattgatcacattctgcccaagtcaattccagaagaactgcagaatggggagggatttggatatatcatcatgttccggccagtgggctcgacaacctggtccaaggagaaagtgtcatctgtggaatcatcaaggtttgtctacagaaatgaaagcatcatcccactgtctccctttgaagtcaaagtgggtgtgtataataatgaaggagaaggatccctgagtactgtgaccattgtctactctggggaagatggtaagttgtcctcaactctggttttctttgagactctatgcatagtttgtgttcccttgttccattttcaatgaaccactctgctaaagatggttatgtctttctctggatggtagaacctcaactggccccaaggggaacttctctccagagtttttctgcttctgaaatggaggtttcatggaatgctattgcctggaata

SEQ ID NO: 369 - DNA, 13217 bp, Homo sapiens
agatgtcatagacttaaaaaaaggagtggctcattttgaaaggattggaggagtaagttactgaaattgttaagtgcttaataaaatgaatcaagtcttttacatgaatcaccatttttcatagttactctctccatctttatttgcatggataatcactgactgtttttgaagctacatttgtttttgttttggtttattttgtttcgtgtcttccgtagaaatacttgttttctagatgtaattataataagggggataataaaagggtttagatacaagaaatgacaatgatactagtatatcttttaatttcagagttgttttatgtttcgtatttatccagctgtaacaataaagtaggacttgttatatgggcttacgtttttatccatttctccctttctgtctgcaggaatctgttggggatttgatgataaggaatattcagttacatcattcaggaaaatatctctgcacagtacaaacaaccctagaaagtttatctgcagtagccgatatcattgttagaggtaagcataaatggtgaaaaagtgatcacattgtttcttcacagttacagtgttcatatctaaattgtagacctctgagaaaccacaccatgttatggaagtgagatgtaatcagatagagttttattttttaaaccccaggactccatggtatgggtagtgtgaatacagacatggaactgtgtgaatacagacatggaactgtgtaggatttgactatcatgaacggtcacgcttggcaagcggtgtcagtaactaaaacttagacataccttctgtttataataaatcattcttgtcaatccagagtcaaatccacatgctcctgtagttcttcatattagctgcaattacttgagttagattttaagaggaattaaagatgatggttctcaatctttgagtataggttgatatgcaatcatcctatgcctgatattttctaatctccagaggaagcactactacattaatgtcatttaccatgtaaagggaattaatagaactttatcgctaataatgtgctataaatacattatggtcaatattttacttcctaagcacaacaggtaaaaataaaccatcctagtaccaaattaatgaatgtaagtatctccaatggagtcatgataaaacatttttttcaaggtccaccaggtcctcctgaggatgtgcaagtggaagacatttccagtactacttctcaactaagttggagagcaggcccagataataacagtcccattcaaatatttactattcagactcggacaccattttctgtgggttggcaggctgttgctacaggtgagtgacaaaagtgttttgggtcactttaaaaataatattttagtccaataattttaataaatgcaattacattttaaattaataattatataattttgtacaattatttgtttttgagtagtcccaacctaggtgccttagtgtctcattctttttagttccagaaattctcaatggtaagacatacaatgcaacagtggttggtttgagtccttgggtggaatatgaatttcgtgttgttgccggcaacagcattgggattggagaaccaagtgaaccatcagaattgttaagaactaaagcatcaggtaaagaatcaatgtgttctaaaagtgtggaagatttcgtatgatacagttcttaaaacaaaacaagtatttttatgtgtcttctaatacttttggctcaaaattgtttggcagtaaacgagtggctctcattttcttttatttttacatacacaaggcaaggtgtattttctccaaatagtaggttcaataagaaatgattacctttaagccaacatgtcaaaatcagagttcttaggaaactgtgtttgcatcgcatctattttctagtcaaaattcattagagaatctgtagatttgtatatgcaaatgagttactgcttgtttcattaaaatgttgtagccaggaattaactgagactctgttggtgcagtcagccatatattttcatctatttctcaactctgaactagttgtagcttcactgagcagtagtataaatttttttccatgcaaatgaggtaaatcctaagctcatttaacaggggcactaattgagcattaattggttcactgaacagcagaacgcaagaacctggatcagataccatgccttcttaagctcttttcaatggatcctctttgttccactcaaacttttacatccagggtgacatttaatctgctagctgtatatagcccacaaagttcacattcttattcgatcacataaacaaaggatcacttgtcatggctagcttaatttaacaaacacaaattaccttattaaagtgtgcacaattgtcagaagtcaataaatcaatccttaaactaaagataatgttatatgtttatcatagaattggggctagaaaaaggacatacttgacagtgatatcatccaattaaatcacgctagaagcttacagctgagaggaaatccctttgttttacagaagaggaaaatgaacaccaggatattagctggttgtttgtgacagagctaggttttgaatccaaacctcctgatttttacacccagcattctccataaaagaggatcttaatgtagatgagcaatagattagccaaagaaagtgtgtaaatatagaaattccccggccctcctatataccccctggatcagaatcttcaggtgttgtccatgactctggatatgagctttagtttcaggttgtttgtttacagttgatttatattttggtagctttggacagggttgacagaaactcttacattttcatagcaaagtttgtgtgccaccttctaaccattaatactctcttgtttcagtagcagaatgagactggtgatattcatacccactgagtcaaactctactaactgaaaacctactgagtctctcgtctctccctctctgtctctgacatcatcaaagactaacaacttgttctcaatatggttttaggcttaagtacaattaatttaaaattgaatagggaaaggaattttctatttctcagaacattggaaactttgtagaaagtaaatcaaaatataattcaaaatacttttccttacacagctaaactatgcaaagatcctgagatagtgtgcagttagtcactctaagctgtcaagcactataaattcagcaactctgtaaaatccactctgattcacatcgcttttgatcaaaggcattggaagtcttagaaaataaggtttaggttcacataacttctttctaaaaaattatgaagcttaaagctgacaaagttaagggtaaatttaaatacgaaaaggtatatctgaaaggtgcaattttgaaaaagaacaatcagattatcatatgactattttctggtcatgtttatagagctaaacatcagtatgaaatggaaataaataaaataagcaatctagatttatttaggtggtctatatggtggggaaaaatttgaaatgaggaattaaaacttacatattttaatccctgcctaccaatccccagacatatccaagtgcctcctcaaccaaccacctctcctattgttcagacatggtccagtatagacaatttcatgtaattccacatttaaaaagtataccctgctgatttagcgattatcacagatttaggatacttttgtcattacgtcaagaaaaataatgcttttaaacacttacgcatgtgtaaagtaaaacctcattctcgtgaggcactacaataccatatacacactcagcatttcctcagttttacagtttctatgaactattattcattgtgttagtccttacaaggatacagagttgaagggcatagatgtttaaaactcatcaaaattactggtttgtgaatcctctaccacagagccttacatcccaacaaataaatagaaagaacctatcccaggcgcattcttgacaggagaaaaacctgactttgcaagtgaaaagttagaagaaaatccctcttcttctctcccgagagatttgagattgtaacgaggagttgtaaaacaagagtatttatttacatatttttcagtatttaattttaactggtcaaatatcctgatgactaataaaaggaaaaattagtttagtttgtttattgaaaaaaaataattaatatactgcctcagtaacttgtttacagctcaactgtataattaggcactaaatcagcagtgtcactgtcaccatctgaatggaacatcattttgccaattagtagatgatgcataatgatgtcaaatacccgatgttactcaatttttaattaattttggagccagggtgctcatgtatcaaacacaactgtgtcctctctcttagaaatttggatatgtgtaaacataatttacgttcattaaaaatgcaagactctctcacagtatgcctgtgtgagattttgaaaagtgaaattcaaaaacaaaattcttcctgatgaagacgtactttaataattgccatcccacatttctcttggttatttttagtccctgttgtggcaccagtaaacatccatggaggtggaggaagtcggtctgaactcgtcattacgtgggaggtaattttctgtccaactgagttattttgaagaaaagagatttaactggccagaaagaaactgaaaaacaaaaagatttatttgatcactattgagagcgtaaaaaaatatggtataaaaatacatcatcctgatgatgaattatttagaggaggtattaggaacttttctcatggtgagacagtatgacgaactcagcacaattttctcccaaatacatgaaaaacaacttcagtatctattgagcgtgggtcagtagcattttcgttatcgcttgatgaattaggcattgtttgatttgttacctgtggcactgttgtattgtgaataagttgagcccagtagactgtaggcaaaaaatagttcttgtcctaaccctgctgttcacctctgatcaactcattcttccctgcatctagatgaaagcttaggcacatggagtagattttgtggtcattcttattacccattaacatacaggctcatttttttacgttattaaaaatttcagtctggtgtgtacacttcaaactggagtataaacgttagaatttagactttcaaccaatttaaagtttctcattttcagtatctcagtgcctcagcctaagaattctatagcgtgaaagggaatacgtggtcagttcaacttctctccattctgctctttaatttatctttccccattcacagtgttacctctggattctccagagctgtagaaggttggtgttggtaggggaggagaaaggaaaaggtctggattgctggtacatttctcgtttgactttggtgtgctctaggtatggcaaattatcagacgctgccatttcatagggtagggtttctgggtttttttatttattttttatctgggagatggccactggatgatcccccaccaaggactcccaactgcaattccttggtgcagacccaactggctgctgaagggtatcagttcctggattttggtggtccatttccagactcttccagtgaatattctctctcttgtaggtggtctttgtggatagagtccccttgaaggctgtccatggatgacccacttgcatgggtttcacatttgtcctcagcagacacataccctgctccatgtttagcggaagtgcaatgcatacccacttagcatctctcttcactctgccaccgtgggctgtctggatctcttccccactttaaatttctcagacatttgtcagttaaatgaacctgcgtcccttatgttccaggaaatgcaaaccaggtgtttcttgctgtagcctacttcacatagctaggctatgagagataactgggaaccagagacgttattctttatggttataaatgacagtgtcagaaactagatgcaattgccctgaaagtcaccctttcctctggatatcttgtttcatgtggacattataggcctagcacagtgcttggaaagtggtccaccctccatgaacacttgttgaatggaaggtagtgttttcagagagttggaactctcagaggccagacagagggggaaaccctattttttcaagcatttacaggatttcaggtgccacacagagcatttcatatcattcagtccccacaataatgctataaggtggttataccactttcaagtaagaaaactgagacttagaaaagtgacatcattgggcagagaagcatttgaacacagggttctctctttctgttcttttactgtatcctgtattacaatcccaattgtcttcatgcattgtgatggctgagggtgggcctgagtccttgagtatatctaccttaagtagtaagttaaccatattatacctactactccaaacatatttcccataaaacactgactttcaaatgagtctacaagagaattgtttgtgagtagtttatttaggtttctatattcatcaaaggccaaataagcattatcatcatagtgtacaggaagttttgcctgacttaataacttattttgttctcctccttggtcagaaattcctacaggctgttgttgcaattgcttgtacacagtctataatgagggcccaaatgctatgcattcattcttaaatagagatgagcatgaattaccaaaagaatactgtctttccacgatttataatgttcttttttctttaaggcaaaggtacacaaaccatgacctatgagacaaatttgtctagtttcctgttttgataaataaatccacccatagctacatccattaatgtattgatgctttcttgctgttgcatgagaccatatatcccacaatgcttaaaatatttactatctggtagcaacaatagacgctagggtctgctagagtgacgagaggaagggcgagggttgaaaaactagctatattaatgggtactgtgctcactacctgggtgacgggatccatcataccccaaacctcagcatcacacagtatatccatgcaacaaacttgcacatgtacccccgaatctaaaataaaagttgaattttttttttaagtttactctctggccctctacagaaaaagcatactaacccctatttttaaaaattaaactaaattaaagccacttcctctgtgtttattttttcttcctgaggaggaggtggggggtggatatctgatatgcagatacttgcagaaagtaaattagtgaaatcggtttcccatttatcactcatatttgacattatgtacaagcagatactgagccaacttcttctggtgcccagcttctttatggaataagttatgtatatttaggagaagattcatacattaggatgaatctgagccaccagaatgcaggtagtaattccttcaatttaatgaactctattaggtagcttctctgttcctatcagtggaatacaaaaatggatgagaaaaggtatgaatgctcagaagcgtagaggacagaatggtcttaacccagcctggaaggaggtcaggaaagacaccatcagaactgagtatatctgaactacgttttgaaaagtgacttggaagtagagaggccaccccaggtcaatgtcactcctgttgtagttgaaatagtacctgttggactttgaaaggcactgcgcgacacaagactgttctaagttcagtcacaatctaccattacgtttcataagtgacaactttaatgattatccttcatttaggctccctgtggtataatctgcctgaactgaactaaatatctttcccgtgttttccccagagccacacaataaatgtagattttttgtttatttgttttgatttggtttgtttccaaaaacctagacataatatcaaatttttagaatatagcaatgggtaattcctttttaagggcatgtttatacattattttatcataatgtgtatactcccaaatacttccaggtttgaggtgcttgtggtgaatgtctcataaatattactataaaattaggtacacaggataaagcactatagagtaagagatacatacctacactgagggttggcacgctttttatttaaagggccagacagtaaaaatattcagtctcgtgggccacatgacctcttttctaatgtctcagtctgcttttgtagctcaaaagagccacataccacttacaaacatataggtgtgggtgtgtctcaaaacctttattttcaaaaccaggctgcatgccagatgtggctagaagtacatagttttgctgattcttagtctgtactaaagatttggttcttacagacactgtggttgagaattacattattagtttatcaattttcatagattttactcccaggagaatttcacaatttctttattttactgaacactgtctccacttaaagaaaactctttttctggccttgttaaataactatatatattttttaatcatttgactctctgttcatgtaagaataaagggaagtatctaaataagtctcttttttcccctctaatctgcatatgttggactcaggtctttcttgagagagcaccatgagaaacactaattgtacttgactaacaaaaacaaaactcccctatttatgtagatgaactgactaagcatcgtgattaaatccgagatcaaagaaacttcagaaatgaatcaaatgctctagcaagtagcatcgattcttataaatctcttccatgccattcaaaattaactggtttacttctagtctccctatgaaaaagaagagaagtgttaatatgaggaaatactttgttgtttccccagatgtccggagcagcacttttcttcctcttttcactttctgtatttgttagactgttccacatggcaagaaatagagaccagctcaggtcatctcgggtaatgggggtttattttaaagctacatgggaagtaatgaggacaggaaaaaagtctcagcaagcaggcaggaaggtcagatgaagaaccggaacatggttcatcactgctctgggcactcgggcacaggagctctaggcaaccatcaacaacccctctgctgatccagccccggcttgaatagtctctcatgcttatgcctcagttcctcccatttcctttacttccagttttctacctggctgccagctaatttggatgccctctctctaatttacagcatctgttttctcttagcttctattgcctcactgttcctgctactccatgttctctactttttgcctgctctgtgtatatctatcattgttttgccacccaccatgtttcatatgcaaactctgtgagaggaattgaccaggtctgttagtcaccgtagagtacagagattctgccctcatagatactcaccaagacggtgcctgtggttctggcgctcgtgaattggtgctcacatgggttccaagtggcaagatagatagtgtgattgatagaataaatggactcccatgaataaagagaacctctgaaatggagttgtggacatgagggactagaagcactgtgtcctgtcaggtgttgcctttattagtctgtcagaatatttattaaaaaaaaaaaagcaaagcattttccttgggaaaaaccaaataaattccattgatttttcaatacaagtttcttgccatcaggagatatgttggtctaaattcaagtacagattcattttaatttgctaagtttatgtgattgtttacaatttttagtatctgcagagtacagggggaatattaccaatttctattttgctattttagtaattttagatttgaaatgtattttatagaatctgatctttgtgagagttaacagtttattctttcatgtgaggaaaaatgcacacatgtcactaccaatgaagatgtatgcctaaaaaaatgatgggaggtcttttatacttttttaaagaaatattctgtgtcttaaagcatatgttatttcacagtaattccattacacatgtcttacaaaaacttgtttaaaatgttgtgaaaggaaaacatatctagtcttgaaataaatagttaagaagttaatttgtgctgagtttaaaaattcatatcaaaccacatttgagtgtgtatcataaaatcttttaaactgttttattattataatttatgaatgatcaaagaaaaatatataaatatgtaaagcttgttttatatttctatctgaaaacttaaactatttatctgagtatctttaactgggatcatttttctaattggcattccaaataaaagtgttttttaatacatcattaaacagaataaatatccatatttgtctctatggaagaaatgtgaaataatcaataaacattatagtagcttaataaaatatttttgcaaatactcagtgattgatcacattctgcccaagtcaattccagaagaactgcagaatggggagggatttggatatatcatcatgttccggccagtgggctcgacaacctggtccaaggagaaagtgtcatctgtggaatcatcaaggtttgtctacagaaatgaaagcatcatcccactgtctccctttgaagtcaaagtgggtgtgtataataatgaaggagaaggatccctgagtactgtgaccattgtctactctggggaagatggtaagttgtcctcaactctggttttctttgagactctatgcatagtttgtgttcccttgttccattttcaatgaaccactctgctaaagatggttatgtctttctctggatggtagaacctcaactggccccaaggggaacttctctccagagtttttctgcttctgaaatggaggtttcatggaatgctattgcctggaatagaaacactggaagagtgctgggctatgaggtaatccacattaatttcacttttgcttatgaatgtgccaatggacttcgcaatagctcctattcaacagtcctatcctactagcctgttgttagcatatgataatgtgtgtctaaagctaaagcagagaatgaagttgagacagggtaggtgagcccccacattgagaggcttagcctgggatgtttcttgtcctcgctcaagacagaattcgagagtgagccagtggtaaaaaaacaaaaacaaaaacaaaaacaaaaaaaaacagctttattgaggcagcagtgttacagttttgaaattgcttctgcagagcagggctaccccataggcagtgtgctaagagcagcagcttggaagcagttctacactcatatttatacccacttctaattacatgcaaattaatgggtgagttagttattcagaaatttctagaaaaagggtggtaacctccaggccattgccatagaaagggatggtaacttccaggtgttgccatggcagtggtaaactgatacggaactggtggttgtgtcttatggagaggtgctttagcctcttccctgtttcagtcagtcttcaatctggtccacagtaaagtcctgcctcctccctcaaagtaagggaaatctttctaggtaattcaaagcaaacaaattaacacatagtagccatttttaaaggcatacagattcagtaagtaagatgagtaagctctaaagatctgctgtacaactgtgcacacagagtcaacaattatgcattgtacccttaaaatttttcaagaggacagatctcatattaagtgttcttaccacaacatcatttttcaaaagtgatcaggtgattatatgattaattattcaaattgcagtcatttttttttcccttggtaagaggtgaagtctgctcctcaatcatcttacaccatggaagaatttcattgagaaacctgctttgtgaattgcagtataacttggaaagatgtaatcatctcagaaaaggcagttaagtaatgaaaaaaaatacctagattgtcttgaatctgctatttttagtctatgaagaataaggcaaattacatttgtaggccttcatctcacaaagtaaagagacaagaacattttaagggaaagttgttcatcactcaatctttttcaacttgcaaattcagtgattcacaaaatgggtaacataatttatttaactttggatttagaataaatgtataatcctaaacattcttaattttgcctatatatatatatatatatatacacacacacacacgtatacatatacatactatatatacacacatatatatacatatatacacatatatatacatatatatacacatatatatatatatatatacacacacacacacacatatatatatatatatataaccataatcctctgattccaacagaaagttctactctcaggacaggtgtcttttccactccatgccaagaatgccttacctcttatctgaaccctagttacttctcaaatttcatccctagtcgcctcttctctctgagctctactcccatcaattcctgatgtattttgtcaaattcttgtagcatattttttctataccacttctttgcaatgcattctgtgacttattttcacatacactgtggattctaacctcttagctagatgataaggggcttgaaaataggtacttaatttattctctttttttttcaatgtacctaaaacaatgctaatgcaaaggtagggttcagtataaattgaattattaattaacctgtgattcaaataactctgaaaagaaatgccaatagcaagacattataatgaaagtctttgactgattatatacaaatgtgtttttgtctgacttgttatacatcatttgctaaagctggtaacctttagatagctcataaaatactttattttggtaatctaaaaaatcacgttctctaatttccattgtgaatttgcattcatgacttttttcctcataaatattagagaataacaattttgttgttgtataaccattttaattagaaaacgtttttgtcatctatacttctgtcttcttcccatattccttgtggttgtggttgatagttgttggtaaaaaatgattgatagttattggggaacaataaattgcttgttttggtttttaattatcaggtcttatactggacagatgactccaaagaatcc

SEQ ID NO: 370 - DNA, 107 bp, Homo sapiens
tcagttgcctacctataaaatgaggaaaaagtcatatttatgttttcataggttttgttcaagattgaaagagattattaataataagtgtccagtacacaccttaa

SEQ ID NO: 371 - DNA, 107 bp, Homo sapiens; identical to SEQ ID NO: 370

SEQ ID NO: 372 - DNA, 7582 bp, Homo sapiens
cggggctcattccaccggatgccaccctctacttcgatgtggttctgctggatgtgtggaacaaggaagacaccgtgcaggtgagcacattgctgcgcccgccccactgcccccgcatggtccaggacggcgactttgtccgctaccactacaatggcaccctgctggacggcacctccttcgacaccaggtgaggggctggaggggagccctgaggcactggggactgtggcatggggagcgggaatccggggcccagcctgcctctcccacctccacctcattttctgcagctacagtaagggcggcacttatgacacctacgtcggctctggttggctgatcaagggcatggaccaggggctgctgggcatgtgtcctggagagagaaggaagattatcatccctccattcctggcctatggcgagaaaggctatggtgagggtgggcaaggacacaaggggaaattccgcagaagagggaaaaaccaggcctccacatacagttgctcaggttgtatactgcacgagggcatccaaccaaggactcaaggtgggatgaaatctacccttggtgctactaagaaggggtgctttggccgggcgtggtggctcacgcttgtaatcccagcactttgggaagccaaggcgggaggatcacgaggtcaggagatcgagaccacggtgaaaccccgtctctactaaaaatacaaaaaaattagccgggcgtggtgggggcgcctgtagtcccagctactcggagaggctgaggcaggaaaatgacgtgaacccgggaggcggagcttgcagtgagccgagatcgcgccactgcactccagcctgggtgacagagcgagactctgtctcaaaaaaaaaaaaaaaaaaagaaggggtgctttattctgattcacacgaaggctcagtatgagccggtggtggccctggggaaaacccagctcaggtcttactggaggagcaagaagcagggctgctgatgggcgggaaagggctctggagagtggggctagtgtcttgcatggtgcccactgggccttcctgagtcaagaaggagcctcggcttgctccccaattttatggttcaagccctatcccttccccagggacagtgatccccccacaggcctcgctggtctttcacgtcctcctgattgacgtgcacaacccgaaggacgctgtccagctagagacgctggagctcccccccggctgtgtccgcagagccggggccggggacttcatgcgctaccactacaatggctccttgatggacggcaccctcttcgattccaggtcaggagggtcttgaggtgggagggcgggggctgggtgaaacgtggacgaagctgggggtcactctgagctgcctggaaggggagggcccctttgactcccttcctggccctcccgccttgtattgcagctactcccgcaaccacacctacaatacctatatcgggcagggttacatcatccccgggatggaccaggggctgcagggtgcctgcatgggggaacgccggagaattaccatccccccgcacctcgcctatggggagaatggaactggtaggggcgttccccagccaccacctcagctcctcctccgaactgcccattgtgtctaggccaccccctcccacagtgggattccaggcaccgctcggcccctctcatcacaaaaacatgcatgcagcttacatctggtcaccccatctgattcctgccacacagactccatcggtttcctccagggcagcgccccacttcgccccttccgcagtggagaagggcagccaagtttggggagggagggtggttatggaaaaacagaaccagcatacccccaggacccagctgtgctgggagcctcagtgtcctcacctgtcaagtgggcaagccatgctgatccgcagggtaagttactgggagtttgcaagacggtgagtggaaaagggctttcttactggaaagctgccttcccctgccccctgccccagtgaaagtttgttagaattgactctggacaaacatcccgtcccatcctcctttggatcctcagggtcgggaaggggtatcaggtctggggacctccatggagagacctcaagtagcctctcctagtgctctgagctgaccacactcccccattctggcctcaggagacaagatccctggctctgccgtgctaatcttcaacgtccatgtcattgacttccacaaccctgcggatgtggtggaaatcaggacactgtcccggccatctgagacctgcaatgagaccaccaagcttggggactttgttcgataccattacaactgttctttgctggacggcacccagctgttcacctcgtgggtccgggggggggccgggactgggcaggtgggtgggcacaggcatggggagtcctcctcagtgcacccccgacgcctgctcctccctcttggtcctcgagcgccaggggagcattcaacctcttgctgctttctgtaagtccccatctcggagcatgtcgaggagatgaaattctctgcttcgcaggggaagggaaggtgaagccaacagttgggggagaactgctctttctatttcacagaggggaaactgacgcagggagccatgagccctcgaggccacactttagggggcagaggcaagatgagaagggaaccccacgtctgcacagctgggcccctgcactctgctgcgtggcccaagtcaccagtgggagtaactccggaactgagggcttgttctgggcccacctcagagggagaggggtgtgcgctggcaggggacagggtggctgctgacctgggcatctgctctcccccaggcatgactacggggccccccaggaggcgactctcggggccaacaaggtgatcgaaggcctggacacgggcctgcagggcatgtgtgtgggagagaggcggcagctcatcgtgcccccgcacctggcccacggggagagtggaggtgaggggctgagaccataatccttttttttttttttttttttttttttttgagatggagtctgactctgtcacccaggctggagtgcagtggtgtgctctcagctcactgcaacctccacttcccaggttcaagtgattctcctgcctcagcctcccgagtagctgggattacaggcacctgccaccgtgcccagctaatttttgtatttttagtagagacagggttttgccatgttggtcaggctggtcttgaactcctgacctcaggtgatccacccgccttggcctcccaaagtgctgggattataatcatgagccactgcgctcggcccgagaccgtaatctgactggcatctgtcccttttgctcctgcccactgtgggtctgatgactggtgggaggagtcaggaatgccttcaggatggctccttaaacatcccatgccccactctccagcccagccccaggaggggaaactggcctgtgggctgggaaacagtgaagccaggcccagaccccggcctgactaggacccctcccttctctcctgccctccctccagcccggggagtcccaggcagtgctgtgctgctgtttgaggtggagctggtgtcccgggaggatgggctgcccacaggctacctgtttgtgtggcacaaggaccctcctgccaacctgtttgaagacatggacctcaacaaggatggcgaggtccctccggaggaggtgggtgaaggttcagtcctaatagccatgcccacgcaatccccgcacccaggaagcatcgaggaagaagacgtcccccgtccggactgcccacccgccctggtgctcctgcctgcgctgagtcccacgcctcaggctccttgtccctgctttttcctgggcacacatgcaggctgttccctacctgagaccagtcacagactatccccatgccacgcctccaccccagcccccaccaggaccccagcaccagtgcctttcccagcccttcctgagttacagggtgcgggggagcctgggaaaaaagaagaaaaagaaagcactcactggcctccacccggggcccctgcccctcccaaggccatgaccctcactgcccgctcccccggctctcccctgccccagttctccaccttcatcaaggctcaagtgagtgagggcaaaggacgcctcatgcctgggcaggaccctgagaaaaccataggagacatgttccagaaccaggaccgcaaccaggacggcaagatcacagtcgacgagctcaagctgaagtcagatgaggacgaggagcgggtccacgaggagctctgaggggcagggagcctggccaggcctgagacacagaggcccactgcgagggggacagtggcggtgggactgacctgctgacagtcaccctccctctgctgggatgaggtccaggagccaactaaaacaatggcagaggagacatctctggtgttcccaccaccctagatgaaaatccacagcacagacctctaccgtgtttctcttccatccctaaaccacttccttaaaatgtttggatttgcaaagccaatttggggcctgtggagcctggggttggatagggccatggctggtcccccaccatacctcccctccacatcactgacacagctgagcttgttatccatctccccaaactttctctttctttgtacttcttgtcatccccactcccagccccttttcctctatgtgacagctccctaggacccctctgccttcctccccaatcctgactggctcctagggaaggggaaggctcctggagggcagccctacctctcccatgccctttgccctcctccctcgcctccagtggaggctgagctgaccctgggctgctggaggccagactgggctgtagttagcttttcatccctaaagaaggctcctttccctaaggaaccatagaagagaggaagaaaacaaagggcatgtgtgagggaagctgcttgggtgggtgttagggctatgaaatcttggatttggggctgaggggtgggagggagggcagagctctgcacactcaaaggctaaactggtgtcagtccttttttcctttgttccaaataaaagattaaaccaatggccttagggtgtcttttggaccaggttgaggggcaggggggaatggctaggggatgaagtggggattgtgggaggcctttagacccagagattggggaaaaagttaaaccaggctgtttccatggcctcattagctccagacagcatgtccccaggtcaggggctccccatctggaggtttcctgcctgccctgggcctaacctggggtcttcgctgtgggaagggagccctgctctgtggagggggtgaatgtgtaaagaggggaggcctccagcagggtgtggagagatgatcctcatcctccaattgtccccattgaatgggaaagacaaggtccctgacctcaaacacaacctacaaagttcaaggattaaaccacacaagtcagattatcctttcccatagatcatttccaatactatgatattcccatctctccctgctcctggccaccacctgttaccacctgcccacccttctccctcttgctaggggaaaggtaatggagttcagatctccacagtgtcttgcaggaggacttcagccaccaaccaggccatctgtcctcgcttgcctggtatgacccgagcattgtgaggacggggtggtgacttaggaaagaaaatgacaggactggactcatacagcaaactgcccccatcagcacttcttgcccagggtcccctaagagacgtgactgctccccacgggcaatgaccgacattctctggccccgaagcatccagaaagctccctgattgaagtctttttttttttttttttgagacagggtctcgctctgtcaccacagcgcagtggtatgatctcagctcactgcaacctccgcctgccaggttcaagtgattctcctgcttcagcctcctgagtagctgggattacaggcacgggccaccaagcccggctaatttttgtatttttagtagagacagggtcttaccatgttggccacactagtctcaaactcttgacctcaagtgatctgccaccctggcctcccagagtgctgggattacaggcgtgagccactgcgccggccaagaaagctccttgattaaagtctggaagtggttactaacccagcctcagatggtggccactccctcctcccaaaaacgaatggaacaggcctgaagcagagaaatgcagcaaaacgcatgggctttggtcagaaacattcaaatcctggctccagctcctagctatggagtttgggcaagttacccatcctgcctgagccatctggaagcaggaggagctgcacctacttgtggggtcattgtgagggtcaactggcaggcacccaagtgcccagagtggcacctgggacaccgcaggccttcagtaacatctgtattacctcccgcttcacatctgcagaataacagaactttccaacggctagccgaacactgcaggaagggtgctggtgatttcctctaaggctaagaaaatgctgaactggctcttcagggtcggcccaataacgcaagaccacagtgcacacatcacttgtttcaccttggcacagtctccctcaggtccctgctctaaattccccttttcaggtcatccactttagtggccccgacccataagaggaggggaaaggagagcctagggcatagggggacagccacacacgaatgcatcccctcagggatccctaaagagggggctctcagacagggttgcctcaaccccaccgatcccaaatgaatttcaagtttgatggctgaatcagaataaagtcaaaccactataggctagaacataccctttcagccccacgctgaaccagacagacacaatcaggctgtgctcggatggggtctcaggccaatttgtggtggttctcaaactgtgttcctagaagcatcccatgtgcccccagggccaagaggtccaggttctacccccacccacatcccctgaatcagagcagcttttttttcattttaaaaattttgatctgtttcacacattatatttgtttgaacttcccatgtttaaaaattttgaagaaaatccctggagtagacaatccctagagcactgacatgctgtggtccaaggttcaccaggaacagtgcctgtgccctgccacatggcggggttccttcaagcctctggtgatgaaggtgctcagggaaaggaggacggaggggcgcggaaggacccagccactgctggccaccctggcctctgctctgtgttcacgggggagcagactctggggaggcgcccctcctcaccacggcctgcaggccgggctggagcctgcgccttcaggggccttgcatctccagctggaccccctggcacaggatgtgctgcagtagcccgttgaccacatccagagtctcgtccttctccagcacgatgtcataggagtccatgtagcgctcccgccgctcctccacctgcccggaatga

SEQ ID NO: 373 - DNA, 707 bp, Homo sapiens
gacctgacgaggccatggaggacggcgaggagggctcggacgacgaggccgagtgggtggtgaccaaggacaagtccaaatacgacgagatcttctacaacctggcgcctgccgacggcaagctgagcggctccaaggccaagacctggatggtggggaccaagctccccaactcagtgctggggcgcatctggaagctcagcgatgtggaccgcgacggcatgctggatgatgaggagttcgcgctggccagccacctcatcgaggccaagctggaaggccacgggctgcccgccaacctgccccgtcgcctggtgccaccctccaagcgacgccacaagggctccgccgagtgagccggcccccctcccatggccctgctgtggctccccagctccagtcggctgcacgcacacccctgctccggctcacacacgccctgcctgccctccctgcccagctgtaaggaccgggggtctccctcctcactaccgccagacaccccggtggaagcatttagaggggaccacgggagggacaaggcttctctgtccgcccttcacacctccagcctcacgttcacttaggcacatcacacacacactggcacacgcaggcatccatccatccgtcattcattcaaatatttattgagcacctactatgtgcccagccctgtttaggcactggcattaccatagagaaca

SEQ ID NO: 374 - DNA, 2894 bp, Homo sapiens
gagtgtgggcctcaacactggacttggccactgactgcagtgagccccaagatggggcaggaggtggtgtttctgtcctggagacccagggtggcttgggtccttgggatgtgtggggacctcggggtgagggcccgttggggccggatgggcacggcaggagagcgggggccacacacccagaggcagtgccgtgtcccggctgggagggttcctgggaagctctgctcagccccagtctcagtcatttctagaaactgtgttttcctccctgtgacgtcacacgtgaaggaaacggaaaagggcagtgagtccttcgccccgcggcgccgtgcgcacgtcagccttcagggtgattccgctcctccagaggggcaggcgcgggtgtggggggtggggcccaggcccatcctgaggggtcccaggcatgaggggctctgagctgtgtcctggggtggtctgggccatggggaggttctggatcatgtcttgagaggtctgggctgtgtggggggtccaggccatgtcctgggggtctgggctgtgtctgtggggagtcagggccatccatgtattgggggtctggggcaggggggggtccaggctgtcttggggagtccgggctgtgtggaggggtccaagctatgcctttggggatcaggcctgtgggaggctctgggttatgtcttggcgggggtccaggctgtgtcttaggggctgggccatgttctggggacgtgtgaatcctggagggtggggccccggtctcgcgggtggctgtgtccctcgagttcaggcagcacctctcggaactttctggatttgcgtgctggcgtctgtcggcctcgatacccacaggctgcgcccctctcagcacaggaagtcctggagaacctgaaggaccgctggtaccaggcggacagcccccctgcagacctgctgctgacggaggaggagttcctgtcgttcctccaccccgagcacagccggggaatgctcaggttcatggtgaaggagatcgtccgggacctgggtgaggctgggtccagcctggccggcacgccaggacccaggaccgactggcaggggccgggcatcgtcgggaggtcggggcaggtcctgcgggagccccagcctgggtgtgggctgacccattcccgtctcgcagaccaggacggtgacaagcagctctctgtgcccgagttcatctccctgcccgtgggcaccgtggagaaccagcagggccaggacattgacgacaactgggtgaaagacagaaaaaaggagtttgaggagctcattgactccaaccacgacggcatcgtgaccgccgaggagctggaggtgagccctggcgcagccgtgtcccggagccggccctgcgaggtgctgtggcgggaggggctggtggatctgggcctgaggcaggaagctgtgctggtgtctggcctgagactccatctgggctggtcactggggcgtttgctcagcggtgtccaccaggctgcatggccgttgttggcgtttaggttcagacggatcagagacaggcgagcctggccgggctccatcctcagccccttgcggaggcgtcagggttctcacagcccctttttaacgggaccacaaggggaagctcatgctgggcccagcatggaggcaggtccaaggcccagcaggtgcaggtgggcggggcggcctgtgccacatggctggaatttaccaccttcctctgaagcgttttcactggtatcatgtgtaggcttgtttttctcccactgctgagtgagtcatcttgtttttatgtagaatcctgtgattcctggcgacagccagtgggcccggcccaggttagggatccttcagaactggggtccaggcctgtgtagcccctgtgccccgttacccctgctggccccgggcaggccttccggggcccccggcttctccctgccctgtgttttcatttgtgccgcctcccttcgggaaccttccagaacgtgcccacactcccgctgcagccaataggcaccttaaatagccacttcgtgcggctggccgcggagctcggagggggaaaggcgacgctgacctgtgccccgctcgcccgcagagctacatggaccccatgaacgagtacaacgcgctgaacgaggccaagcagatgatcgccgtcgccgacgagaaccagaaccaccacctggagcccgaggaggtgctcaagtacagcgagttcttcacgggcagcaagctggtggactacgcgcgcagcgtgcacgaggagttttgagcgcccggccgcgccccgcgccgccccccacgcaccaccggggcggcctcgcgggtgactccgggctccgtggctgtcccggaccccacctcttccctgccgcccgccaccggccgaccgaccgcggctgccccagttgatgagcggcgtgtcccctctgcagcgcgcaccccggcggggctttggctgtgacgcggtcggggcgcggggctgggctgtggccccgcggcgccgcctcctccctggtccctcgaaatcgtggcatctcacttctgagaacgaaatctcgcttcagtcactctgccgaaggcgctgacggcatcgcggccggaacctctgggcccggcccctcccagggccgccgctccgtgggaaaaaacagctcctccatttccttgaaaactgaacgattattaaaaatagattaaacttcgctggaaatgagtagccaggaagttcaggggagggtgccgggtccttcccgggcctggcgtgtcggagccacccaggtcccgcagctgccgctgagaaaatgcaaatatttgttgtgacaagaatcacatacatttactttaaatatagttgccttttttggtcagcttca

SEQ ID NO: 375 - DNA, 6573 bp, Homo sapiens
gtgacaatggttctaaaatccaaaactttgtattagaatgggatgaagtaagtaaattgaatctttttaaatggttaacattatgtgcatatgttcaggcaaaattaacttttttgtttgttttaatcatcaagtatattcttctgtcaaaaaaagtatgaatgattttgtgtggtgcatgagtggattgatggtgttttcagaaaacattcctgacttaacttccctattttcaataaatcaccatcaaaattattatttaggtaactaccttgataaaggaacttttttttcacatcagccttaaagacaagtgtattcctttcctatggctgctataacaaattaccccaaacctgacattaaaacagcacattattctcttacttttctggaggccagaaatccaaaatgagtttctctgggacaaaatcaaggtgtcagcatggccaggccctctccagggactttagaggagaatctgtttccttgccttgaccagcttctgtaggctgtcctcattacttggttcatggccacatcacattgcgttttctccccttgtttccatcatcacatcaccttcctcctctgtcttcaaatctgtcttccttttttaggaacacttatgattccatgtagggtctattcagataatccaggataagctcctatctcgagattcttagtcacattgtacagtcccacctaccatataaggttatattcacaggttcaggggattgggacctggatattcatggtggccatgactcagccaaccacagcaagcatactggacttcattgtttagtacaggggtgtccagtcttttggcttccttgggccacacaaaatactacatttgtgcaaaggtagttgctgtttttgccattaaaagtaatggtaaaaacagcagttacttttgcaccaacctacattaacactaacaatagctaatgagcttttaaaaaaatgacaaaaatatctcataatgttttaagaaagttaacaaatttatgttgggccacattcaaagctgtcctgggccgcatgtggcccttgggccgcaggttggacaagcttggtttagtacattgtttttactatcagttaccatgttctctcttgccctatggcttgtaccaagctaagaagaggggccagagggagtggaagaaattccattgataagttgggaattcggcagtatattaaaagaataataaagcacaaccaagtagattttattccggaaattctaagataatttagaattaggaaacctattaacatatcacattaatttagaagaaaactatattgctaaattaaggaagagtatttgataaaaattaccattcatctcagttaaaactcaaagcagattaggaatagaaaggtaatttcttacttgatagttatttttgtaccatcactaaacaaaggcatttttatgcaaagctgaaataagtcaagattgccaattatccctacctttatttaacattatttcagaagttacacttaaggcagtatgacttgaaaccaaagcaaaaagtacagtcatggtgtctggctcggggcaaaactgtcattatttagagatgatatgattttctacttagaaactcagtcgaatcaactaaacaacatcagaactaaaaagagcatttagtaaagcagtcaagtacagtctacaggttttctttgaagcagaagtcaccctaactaccattttatctctagcaacacaataaagaaaaatgggtggcaaatgtgaaacttacccattttagttaccactctaaatttctaaaactctttagttgtcctcttttctctctccttcttattgcctgtaattgggctgtgctctctgctagaacattttcagtgttaatctaagcagtagaagcgccaaaagttttattttaaagaagtttatgagctatctagttggaagtttgggcatgggtaaggaccttttcttaaaactgtctgcttagagctttccataggttgaaaaaagccgccagttgaccctatcaaagatcgtcaccccatttctaccactggtagtcttctatggagattgtagggtccatacctgcagagtttcctttattaaagccagagatttaacattggctaaaagatggtacttaattcaagaagctgtacaaagatacctgctctctggtgttttaattctgcatttgatgatctatatcatataaaagatgtgctgtatctcagccttctcttgagatccatgacttttagtatacacttgctaatatgtaactgtcaagaaggaattgatgcgaatttatctttttacagtaatgtacatggtatataataatcagccatttcttgtagggaaaaggaaatggagaattttgtcagtgttacatgggctcacagaaacaatttaaaattactaaactttcaccagcaatgggctgtaaattcagactatcggccagaaatgactatggtacaaggtaaggtgtactttataaaagaatgtaaatatttttagattatcaagtcaacgtcaattgtataattatttactgtccaaattattcattaaaaattctgcttagtttatctctttgttgatatagttaagatgtgttaccagtctagcaaaagctataagagagttagttacataggaaccacaggaaacattaaacttacaactttccaagattttcagatataaattagatttttatatgtgacaaagagatttttcttttgctcctcagcatatgtgatgacagtattttgtttaaagtcaggtgaactgtaagaacatctaaaatacccaatttaaatagaaaggccaagtatctttcaagagtcattgaaattatttttgttctagagatagctctgctcaccttaggggcaggtgcgtttaattacacaactgagaacttacattttctattttatataaatggcattatatgaaagtgtgtttaaaagttacaacatttacaccaatacacgagtgttattgtttccataaggtaatgtgtatattttttcattgactcgataaattatgatataaaggcttacaaatctgaacaaaactgcatttttaatagaacactaattcactgtttggtatctgacctggttatcataaagagatcaaacccaagatatattatttgtattataattcattatcaaaacttgtcattttccaaaaaaattacatctgtcacaaacttgttctttcactgtaaaaataactttttcatgccttttaaaaccatttgtttcaacagtggttttagtgaagaagtcttatattacacctcaggctgtgctccttctatgccagcaagtcctgtattaaccaaggctggaattacttggttatccttacaatggagtaagccctcaggaacaccatcagatgaaggaatttcttacattttagagatggaggaagaaacttcagtaagtgcaaatatggattttaaatagtgtatttaaaacattttcagcttaaggagattttgggctgagacgatggcattttctaaatatacaatcatgtcatctgcaaatagagacaatttgacttcctctcttcctatttgaatacgctttatttctttctcttgcctgattgccctggccagaacttccagtactatgttgaataggagacgagggcatccttatcttgtgccagttttcaaagagaatgcttccagcttttgcacattcagtatattggctgtgggtttgtcataaacagctcttattattttgagatacattccatcagtacctagtttattgagagtttttggcatgaaggggtattgaattttatcaaaggccttttctgcatctatcgagataatcatgtggtttttgtcattggttctgtttatgtgatggattacgtttattgatttgcatatgctgaaccagccttgcattcctagggatgaagccaacttgatcatggtttttcgatgtgctgctggattcaatttgccagtattttattgaggatttttgcatcaatgttcatcaggcatattggcctgaaattttcattttttgttgtgactctgccaggttttggtatcaggatgatgctggcctcataaaatgagttagggaggagtccgtctttttctattgtttgtaatagtttcagaaggaatggtaccagctcctctttgtacctctggtagaatttagatgtgaatccatctggtcctgggctttttttggttggtaggctatgctggaaaccattattctcagcaaactaacacaggaacagagaaccaaacactgcatgttctcactcacaagtgggaactgaacaatgagaacacctggacacagggaggggaacatcacacagcagtgcctgttggagggtggggggttaagggagggatagcattaggagaaatacctaatgtagatgatgggttgatgggtgcagcaaaccaccatggcacatgtatacctatgtaacaaacctgcatgttctgcacatgtatctcagaacttaaagtataattttttaaaaaatcagaaaaaaaaacattttagtgtggcattaatcctaatacaataaatattgccactcctaatacagtaagtattgccacagtagttagctcatttcccagtcctttgaagccttggcttgttactgtttgggagaggttaggtatgatggagaactcagtctttttttttcttttgcaacagggtcttgctctgtagcccaggctggagtgcagtggcacaatctcagttcacttcagccttgaactcctgggctcaggcaatcctttcacctcagcctttcaagtagctgggactacaggcacatgccaccatgcctggctaattttattttttgtagtgacagagtttcgctatgttgcctaggctggtctcacactcctaggctcaagtggtcctcccacctcagcctcccaaagtgctgagattacagacttgagccactgtgcccagcctgaaaactctgtcttttcttttgatgtgaagggggttttgttttatttgtgtgtgtgtatatatgtctgtctgtgctttggaaccacataggctgcactttaactatatctgttttagggaaactatgaggaggggaagatcaccacagccttcttgactaagcagctctaaaagatgaggaaatattgggtctgcctttctctaactgtatttatacactgcttcccaaggtgtcacagaagattttaaaagtttcctgtgaaactgtagtacagcctgaatctagttacacatcactgacatcctattacctagaggctagctgaccaggagttagggtgtattctattattaaatctatatatagttcatagattttcagagctactttgaaggaatatgggtcaaaaatggcattggtccacccctaagtatatacccaaaagaattgaaaacacatgttcatacaaaaaaattgtacacaaatgttcatagcagcattattcataatagtcaaaaagtggaagcaacccaaatgtccatcaacagatagatggataaacaaaatgtggtgtatccatacaatggaatatttttcagccataaaaagagtaccagtatatgccacaaccttgaaaccaaccttgatgacctatatgaaccaaccttgaaaacattatgctaaagaacccagttacaaaagactccatattatatgattccatttatatggatatagacaaatccatagagacaggaagtatgttagtagataggtggagggaagtgactgctacccaaaaaaggacaggctttttctgaaattaggaattaggggaaagttgcacaactttgtgaatacactataagccattagattttatactttgaaatggtgaattttacagtatatgaattatatctcaatttttttaattcaaaaaatgataacgttcggaaaatttgtaaagcattgtcactagtgctggaaatagccatcccaaacctaagtgacatcctcacctgccagcacaattaacccttcaattatttacttagacaaccatgtgttaaaggcaagttaaatatgttaactacttacagttctattcagctcttgcacgatgtctctgggaaatctctgttcttgggatagcttactgatggtgaagttaccattggctccaactctataaactcttccctcaacacaaagatcgtcttctcttggctactatatttactgagactaagtggcctgcttcatcttctaccaaatgttcaataagcatttccgggtctacccactgaagacagaagcatcgaggtgaggattccactcaacagagcattagtcatattgcacatagtagaagatgaagagaaacccgggtcttttcacatattcattattgcccatatttctattgttagacatcgaatgaagactttgttttttccttttccagggatatggttttaagcctaaatatgatggagaagatcttgcttacacagtgaaaa

SEQ ID NO: 376 - DNA, 539 bp, Homo sapiens
ggttttactgctcctgagcaccctcccaatggacacagctaggaactatatgtgtgtatatgtttagtttatatacagatatttatacatgtgtatatacataaatagacaattacaacacagatacatatctgtgtctctgtatctctgtatttttaaaaatcatgagttcacaccagataccttcaattctaatccagtgccacaggttaattttagttttcccctgtccttatttctaacttccttcatcatcagtgagaaactttgctcattagttgataaattcaacatttaaattttcctgccagtgcttatttaatcaaaccatttcaaataaatgataaaagccactgtaaattgttttcactattaaaaagcaaagaaattttattacttcttgagaatcttaagtctttagcaatgggaaatttgattatttagcacataataattgttatgctttattttatgctattagcttcattttaaaaacttataataatgctatgtcaatttaatttctaaatatgattttc

SEQ ID NO: 377 - DNA, 510 bp, Homo sapiens
atgactttgtgatctgggatgatttatttggttctttgaagccctcattttctcttttgtaaagttcaggtaatagtacttcatagagttgattggaggactaaatgagataaggtaaaacactttacacttaatagtatcccctcaaacttggagaaaagctagaggatcagtcttaggttaaggtggacattttaatagcctcactggaaaaagagaaaaattaatcaagtaagtgtgagagacctcagcaactagactagagcaatctggagtcattaacacttggaaaatgtctttttatatccctcacttcctgctgagacttttgatctctctctttggattctcttcctctatatcataagagctggagtttcccaaagattcttcctctgccccgttcacattatattcatttttaactgccactactttgccagtcagtgagatattaccctaacttacaagcaaattctggccatgctaaccagtttaaaattataattt

SEQ ID NO: 378 - DNA, 362 bp, Homo sapiens
aaacttttataacaaaattaacatcaaaaggtatatactttttaaaaaaaatttacttttattgatgtgtactcttcctattgatgagttaattccataaatctctacttagtttaacttattggatcaaattatcttcagcatgtatatctggggaaaaaaggtccgaattttcacatttatatttaaacttcaattttttatatttaaacttcaattttttagcaacagctgaatagctttgcggaggagtttaatagttacacattcatgctaatatacatttcctttaaacatccacaaattcttaaaaagattgaatcagtaaatttcatttcagctaaaaatggagtctaatatat

SEQ ID NO: 379 - DNA, 1083 bp, Homo sapiens
ttttgtttactatgcataaaagtctacaatctaattaatagcaatactagatgtttattattagaaaagatgctgagagtatttatcaggttttacaaagtcattttaagaaagcaagatactgatgttaacagaataacatttttggggaagctggctccctattcatggtattttaagagatcatttgtatattatttatcacactgttgtaatgatgttttgagatacttttataacaaaattaacatcaaaaaggtatatactttttaaaaaaaatttacttttattgatgtgtactcttcctattgatgagttaattccataaatctctacttagtttaacttattggatcaaattatcttcagcatgtatatctggggaaaaaaggtccgaattttcacatttatatttaaacttcaattttttatatttaaacttcaattttttagcaacagctgaatagctttgcggaggagtttaatagttacacattcatgctaatatacatttcctttaaacatccacaaattcttaaaaagattgaatcagtaaatttcatttcagctaaaaatggagtctaatatattgtttcaaaagatacatttttacccaccataaatgttacaatatctgaatatgctttgtcaaactatccctttatgcaatcgtcttcatattgtttttatgattctaatcaagctgtatgtagagactgaatgtgaagtcaagtctgagcacaaaaagataatgcacgatgagattgcctaccattttataggatatttactatgtatttatacgttaagacctctatgaatgaatgtatcagagaatgtctttgtaactaactgtttaattcaatctgtaataaaaatctaactaactaactcatttatttctattaaaaaggtattgtcctttaggcggggaatgggaatccttgctgcactgttgcagtcattctgaaaggacctttccctgtacttacctttcaacatgcttcaatcttatcaacgctacattttgtatttttcaaacaagtataaattctgcaataaagagatgtagtttttttttaa

SEQ ID NO: 380 - DNA, 593 bp, Homo sapiens
ggattcaatcatctttattaacctatcatcagtgttacattttatacataatatcttgtattctcaaagggctctactttagtacatcatgttaatagtaaaaagccaagtaagatggctaaacctcaccctagcattttaatatcctccggacaagggaagctagaaagtcaagtcaatcactttatacatgtaagagtagtgttccaaagtaactaagaagctgctacatttttaagcagggaggaaaaaactttcattttggtctttgtgttccagcaaattatactttcaattaacaccaacaatgatatcataaaaaatgctctgcttttaaatttctgaacttcttcaatacaaattaaaatagtactggagtcttttgggaggccaatagctagcagctacattaattggtgtagaggagcctccttatcgataaccaggtccaggttgggtatagccctgaccaaagggaggacggttacgcgcataaggattaggcccacttggaggaggggtcatggtacttccaggaagtgaagtaaaacctggtcttggttgataggccccaggttggcttggagccattc

SEQ ID NO: 381 - DNA, 120 bp, Homo sapiens
ctccaggagaattcctgagttttgctgatgacttactctctggcctgggcacatcttgtgtagcagctggtcgaagccatggagaggtccctgaagtcagtatctactcagtcatcttca

SEQ ID NO: 382 - DNA, 8269 bp, Homo sapiens
cagaccccaatatttggagcagaaccccaagatttgacatctaaaacctcaagcctggagctgaactctgaattctgggcctgggaccttgaaatctgggactggatttccagtactgtaccctggaacccactcttggggacctgaaccctgggattcaggcctcaaattccaagatctggactgtgggattccaaggggcctgaacccgagtttgggcctgaagtccttgctgcagacctgagtgcttaaatctggggcttgagacctcccaatcttgactcagcaccccaatatctgaatgcagaaccccgggatcggatctcagactctaaaccccaccgtttggctgcttagcatcccaagactggacctgggagaccctgaccctgaacaacccaaactggacccgtaaaactggaccctagaggcccaatatttaggggtctggaaccccgagtattaaggtctggagactccgttgccacagatttgagccgagtcaggacacagtccctctacagaagccttggggacaggaaaagcatgaccagatgctccctccagagccctgacctctgactcccctggagctaggactctgctccctggggctgcttctagctcaggtaaggctgctgaaacctcaaggtggggacgggctgggaggagcattgtggctgcgggttacggtaccaggtaccctttgacactcttggggtttctccagaaaaaaagacattcccccatgggtctgccttcagctcctgctctgctccaaacactctctggacactggccatccttgcccctctctgaccttccctgcctcagttgatgggacctccaggtctctgacccctgcaacccttacagcctttcgctgtctatccggtccgaccgtctccgccacctctcttgtccaccactcctctctctgggctcctttctccacctgtcctctcaatggccatctctgttccctttttctctctctgatcatctttgtgacacccctgtccacaggtcctctctccagtcgcctctgcctgctgcttctcagtgaccatcgctgacatctgtgtccactgtgcctctctctaatcatcattcaccagctctcttgctccttctccacccctgaatctaagcctaggtctgtgaccgtccccatccatctttgacattgctgtccaccactcttctctccagcagcctctgtccatctctcctctctagcttcctctggccacctttccctttctctggccatctctcccactgctcttgccctcctcccacccctgaccctaactcccagtctgcaactgtctgaccatctctggccacctctcctctctctctcactcactgatgccctctgatcatctctggccacctcttctctctctctcactcattgatgccctcttgatcatctctggccacctcttctctctttctcactcactgatgccctcttgatcatctctgcccacctcttttctctcgctcgctgatgccctctgatcatctctggccacctcttctctctctctcactcactgatgccctctgataatctctggccacctctcctctctcacttgctgatgccctctgatcatctcgaacatctctgctgcctttcctctctccgatgacctctccccgcaccatcctcctgagcagctgtcctgggctcccactgactctgccatgtctgtccttttcctcctctctgaccaccttgctggctttgggccgtttctgaccacgtgtctctgacatggtcatctcccccagatctgagcccaacccatgccctcccttctctttgtccactgctcatcttcctgaccatctgtaaccccttctcttctctggtcatatctgaccacttctgatcattgttgccaccctggctgccccgtctccccatggccagcttttaccatctctgaccacgtctaaagccctctggttttcctgccactcacccagaccagctgtcatttctctgaccatttctttacttttttcttttggagagacagagtcacgctctgttgcccaggctggagtgtggtggcgcaatcatagctcactgcagcctcaaattcttgggctcaaattgatcctcccacctcagtgtcccatgtagctaggaccacaggtgggcgccaccatgcctagctaatttttaaaaatttttgtataatagatacacggtctcactttgttgcccaggctggtcttgaactcctggcctcaagccatcctcctgcctcagcctccccaaatgctgggattacatgtgtgagccaccgcgcctggccttcctctggcttttggtcacatctgacggtctttgaccagcccttctgccctcagcccactgtgaccttctctcctggtctcagaccacccccagcccctgcagaacccctcttctgccctcacgcctcccctcttctccgcaggacacccctgcccgcgatggccatcctcccgttgctcctgtgcctgctgccgctggcccctgcctcatccccaccccagtcagccacacccagcccatgtccccgccgctgccgctgccagacacagtcgctgcccctaagcgtgctgtgcccaggggcaggcctcctgttcgtgccaccctcgctggaccgccgggcagccgagctgcggctggcagacaacttcatcgcctccgtgcgccgccgcgacctggccaacatgacaggcctgctgcatctgagcctgtcgcggaacaccatccgccacgtggctgccggcgccttcgccgacctgcgggccctgcgtgccctgcacctggatggcaaccggctgacctcactgggcgagggccagctgcgcggcctggtcaacttgcgccacctcatcctcagcaacaaccagctggcagcgctggcggccggcgccctggatgattgtgccgagacactggaggacctcgacctctcctacaacaacctcgagcagctgccctgggaggccctgggccgcctgggcaacgtcaacacgttgggcctcgaccacaacctgctggcttctgtgcccgccggcgctttttcccgcctgcacaagctggcccggctggacatgacctccaaccgcctgaccacaatcccacccgacccactcttctcccgcctgcccctgctcgccaggccccggggctcgcccgcctctgccctggtgctggcctttggcgggaaccccctgcactgcaactgcgagctggtgtggctgcgtcgcctggcgcgggaggacgacctcgaggcctgcgcgtccccacctgctctgggcggccgctacttctgggcggtgggcgaggaggagtttgtctgcgagccgcccgtggtgactcaccgctcaccacctctggctgtgcccgcaggtcggccggctgccctgcgctgccgggcagtgggggacccagagccccgtgtgcgttgggtgtcaccccagggccggctgctaggcaactcaagccgtgcccgcgccttccccaatgggacgctggagctgctggtcaccgagccgggtgatggtggcatcttcacctgcattgcggccaatgcagctggcgaggccacagctgctgtggagctgactgtgggtcccccaccacctcctcagctagccaacagcaccagctgtgaccccccgcgggacggggatcctgatgctctcaccccaccctccgctgcctctgcttctgccaaggtggccgacactgggccccctaccgaccgtggcgtccaggtgactgagcacggggccacagctgctcttgtccagtggccggatcagcggcctatcccgggcatccgcatgtaccagatccagtacaacagctcggctgatgacatcctcgtctacaggtgcagggtccaggcactggggtagcttgggtgggggagtgaggcaaggggagggttgagggtacacctactaataccctacaccgaagcacaactgataagtgatgctggaaggttccaaaagaaatcagagagcaaaagtaaaagaaatcaggcagcaaggataacaagactctggcagaaagggtcaatgaaatctgacagcagtgataaaaagaagtcagacaagaaggacgaagtaaatgagacagcaaatgttaaaatatatcaggctacagggctaaaaaagatcaagcaataaggataaacgaaatcaggctgcatgagtaaaaagaaattaggcagcaagaataaatagtagtagcaaacataaaaaggaaaccaggcagcgggaggagaaagtaatcagggcagaagaataaaatgttaatgggcaagggtgggtggggaagataaggggataaaaataaatttaagttgtaaagataaagagagaaacaccaggttttccagatgacaggactagatactagctgggctgcaggaagaaaaggagatcaaacaggaaagcacagggagcccagaaacaatgaaataagcagctctgttagaaaaagaaatcagaccagaggttagaaggaaattgcagggaggaggttcgatagagactgggcttcggtgtgtgtggtgtgaactattccatgtttcaagttctaatatagtgacatccagatttttttttttttgagacagggtctcactttgtcgcccaggctggagtgcagtggtgcaatctcggctcactacaacctccacttcccgggttgaagcgattcttgtgcctcagcctctcgagtagctgggattacagacgtgcaccagcacgcccagctaatgtttgcattttatttttagtggagacggggttttgccatgttggccaggctggtctagaagtcctgacctcaggtgatccacctgcctcagcctcccaaagtgctgggattacaggcgtgaaccaccacacccagtgtagattttttcttttctttttttttttgagacggagtctcactctgttgcccaggctggagtgcagtggcacaatcttgactcactgcaagctccgcctcccaggttcatgccattctcctgcctcagcctcccgagtagctgggactacaggcgcccgtcaccatgcccggctaattttttgtatttctagtagagatggggtttcaccatgttagccaggatggtctcgatctcctgacatcgtgatccacccgcctcggcctcccaaagtgctaggattacaggcctgagccaccgcgcccgacagattttttattttctaaatcaaatcaaacctagttcaagttccttttgccaggtaaacagaaatatccagtttgccacacttgtgggggattctcttctctctcctgttgttgcaaacacagaacctggggtttacacactccaagaggtggctcagtccaacttgttcccccaagctggagagcactcagcacatctgcagtgaccgcatgtggtcagcagtggtggctgctgacctaggtgctgttgacacctcttaccaaagtccaaccttgcatggatggactgcggctgtgggtgagtccctgtcctcacggccaggctgggccaagggtgcagccccaaggctgactgtaaagactggacctccccagggttgaggactgttccttggggacctagtagtacctggatgtcctttccctcccttggggccaacacctcaagaaaaggccacttgatttccatttcagtcctggcaacccactgagctcattctactccctttctcagacatgactcggaagattgcacggaagtcctgcccctgaaaatcacacaagtcggccaggcgcggtggcttaacccctataatcccagcactttgggaggccgaggcaggtggatcaccaggtcaggagtttgagaccatcctggctaacacggtgaaacctcgtctctactaaaaatacaaaaaattagctgagtgtggtggcacgcgcctgtagtcccagctactcaggaggctgaggcaggagaattgcttgaacctgggaggcggaggttgcagtgagccgaggctgtgccactgcactccagcctgggtgacagagtgagactccgtctcaaaaaaaaaaaaaaaaagtcacacaagtcctggccaccttgccaggtggggaatgggatgaatgctgtcctagacagtcaccctgccccaggcggccacggagttccctgtacctctctcattagaatagcctaggaataaaacaggtgataagtcaactctccaacagggtgcccaactacaaaagaaactatagtgaaattgggtggtaaggattaaaaggaaacaagaaagaaaaagataaatagaaaccagccaacagagataaaagagaagcaggtgacagagccggaaagaaataaggcaacagggagaaaaagaaagcagtagtgacggaggcacattagtttaatgaaaagggaatcagacgacaggactcattggaaaacaggctatcaatacagtcatcataataaggcaatagggctagggggacatttattggcaggttacaaggaaatcgggcaacaggggtacagggagatcaggtggtttgattggagagaatcctagctgtacactagaggaaaatcaggcagctggaaaagggaaatttggcataggctgcaggaaataggggaaccagagggaaattggcaagcgtctggaggagactgggaggtaaaatgtgggggaaattggatgggggtggctagaagacaaaaggattaaattagatggaaattggacagggttagagcagaattgggtggtgaactggagagatgactggcagtgggaccagagtgaaatcaggcagaggattggggcaaaattgggcagggaggctagagcggagctgggctgcaggctggagggaaattgagtgggcagtgcaaaagggaaattgggcagttgggtataaaatgaaaccggcaaggtgtggtggctcacgcctgtaatcccaacacttaaggaggccaaggcaggaggctggactgccttgaggccaggagtttgagaccagcctgggcaatatagcaagagcctgtctctacaaaaaatttaaaaattagctgggcatggtagtgcacacctgtagttcctgctactcaggaggctgaggccggaggatggcttgagtccaggagtcagaggctgcagtgagctgtgatcatgccactgcactccagcttgggcaacagagcaagaccctgtctataagaaaacagaaagaaagaaagaaaagaaacaggatggattggaagaactcacgtggtgagctgttagagaaattgggtggtgggactagagtgaaaatgggcagcaggctatgaggacgtgtgagagggtgggctagagtgaaattggccaacagactggaggggtatcagtcaggtggctgaatgggatgtcagaccaaagggaattgggatgttggtgagagggagctcattgggtagaatgaaatgaaggagtggactggtgggaagtctagccccgcagggagtttggtgggggaagcacaggttgggggctgggcagcctgagacctgacccccacctgcctgccctgcaggatgatcccggcggagagccgctcgttcctgctgacggacctggcgtcaggccggacctacgatctgtgcgtgctcgccgtgtatgaggacagcgccacggggctcacggccacgcggcctgtgggctgcgcccgcttctccaccgaacctgcgctgcggccatgcggggcgccgcacgctcccttcctgggcggcacgatgatcatcgcgctgggcggcgtcatcgtagcctcggtactggtcttcatcttcgtgctgctaatgcgctacaaggtgcacggcggccagccccccggcaaggccaagattcccgcgcctgttagcagcgtttgctcccagaccaacggcgccctgggccccacgcccacgcccgccccgcccgccccggagcccgcggcgctcagggcccacaccgtggtccagctggactgcgagccctgggggcccggccacgaacctgtgggaccctagccaggcgcccccccctctaagggtcctctggccccacggacagcaggacccggacaccctgtgggacctggcctcaaactcaccaaatcgctcatggtttttaaaactctgatggggagggtgtcggggacaccggggcaaaacaagaaagtcctatttttccaagcttgggcgaa

SEQ ID NO: 383 - DNA, 3372 bp, Homo sapiens; identical to SEQ ID NO: 351

SEQ ID NO: 384 - DNA, 351 bp, Homo sapiens; identical to SEQ ID NO: 354
